United States Patent Application Publication US 2014/0317781 A1 - sequence listing, part 2

SEQ ID NO: 3160 - protein, 526 aa, Zea mays
MTRTTTSSTLLTAALLCLALPLLPGATANKAARRRQGDNLARLRGSPWPAESSVSLAVAATDDRASRHAASPPAGRSKEDDRVDKLPGQPSGVDFEQYAGYVTVDAAAGRALFYYLTEAVGGGAAAKPLLLWLNGGPGCSSLGYGAMEELGPFRVKSDGKTLYRNPYAWNNAANVLFLESPAGVGFSYSNRTEDYSRSGDNKTAEDALLFLLNWMEKFPEYKGRDLYLAGESYAGHYVPQLAHAILRHAAAAASKPSSSPINLRGIMIGNAVINDWTDTKGMYDFFWTHALISDATADAIGRHCNFSAAAAAAAAGSNDKCDEATSEADEALEDIDIYNIYAPNCQSADLVSPPITPSMDNFDPCSDYYVEAYLNGPDVQRALHANVTRLDHPWSACSDVLRRWTDSAATVLPILAELLKNDLRVWVYSGDTDGRVPVTSSRYSVNQLQLPVAAKWRAWFSSTQGAGEVGGYVVQYKGKEKGSLSLVTVRGAGHEVPSYQPKRALVLVQGFLAGKALPDCETCESG

SEQ ID NO: 3161 - protein, 524 aa, Oryza sativa Japonica Group
MRTSTSNAALLLLVAAAQCLALLSVAAAAKPRTRQGDYLDRLRGSPSSWASLAEDRGAPAPSPSPSGGRHAAPAAAAVGSKEADRVAGLPGQPAGVGFAQYAGYVTVDAAAGRALFYYLAEADGGAAASSKAPLLLWLNGGPGCSSLGYGAMEELGPFRVKSDGVSLYRNPYSWNNVANVMFLESPIGVGFSYSNTTADYSRMGDNSTAEDAYKFLVNWMERFPEYKGRDFYLAGESYAGHYVPQLAHAILRHSSAAAGGKPSSSPINLKGIMIGNAVINDWTDTKGMYDFFWTHALISDEANDGITKHCNFTDGADANSLCDDATSLADDCLQDIDIYNIYAPNCQSPGLVVSPPVTPSIESFDPCTDYYVEAYLNNPDVQKALHANITRLDHPWSACSGVLRRWVDSASTVLPIIKELLKNNIRVWVYSGDTDGRVPVTSSRYSVNQLNLPVAAKWRPWFSNTQGVGDVGGYIVQYKGNLSLVTVRGAGHEVPSYQPQRALVLVQYFLEGKTLPDCEKCGEA

SEQ ID NO: 3162 - protein, 516 aa, Hordeum vulgare subsp. vulgare
MKCTVVALVLLVAVQCLVLGAGPAAAAKARRTRQGDYLNRLRGSPSSRASWESLAAVEEQTTTKAAGRPAPVAAAVEAGRKEADRVEALPGQPRGVDFAQYAGYVTVDAAAGRALFYYLAEAVGGNGDKPKPLLLWLNGGPGCSSLGYGAMEELGPFRVMSDGKTLYSNPYSWNHAANVLFLESPAGVGYSYSNTTADYGRSGDNGTAEDAYQFLANWLERFPEYKGREFYITGESYAGHYVPQLAHAILRHASPAINLKGIMIGNAVINDWTDSKGMYDFFWTHALISDETADGISKNCNFTAYGAGVASNALCDAASDEVGESLADIDIYNIYAPNCQSEKLVTPPIAPSIDNFDPCTDYYVEAYLNRPDVQKALHANVTRLDHPWSACSDVLTRWVDSAKTVLPIIQELMKNSIRVWVYSGDTDGRVPVTSSRLSVNQLQLPVAAKWRPWFSSTKGAGEVGGYIVQYKGDLSLVTVRGAGHEVPSYQPRRALVLVQNFLAGKALPDCKECEQD

SEQ ID NO: 3163 - protein, 516 aa, Hordeum vulgare subsp. vulgare
MKCTVVALVLLVAVQCLVLGAGPAAAAKARRTRQGDYLNRLRGSPSSRASWESLAAVEEQTTTKAAGRPAPVAAAVEAGRKEADRVEALPGHPRGVDFAQYAGYVTVDAAAGRALFYYLAEAVGGNGDKTKPLLLWLNGGPGCSSLGYGAMEELGPFRVMSDGKTLYSNPYSWNHAANVLFLESPAGVGYSYSNTTADYGRSGDNGTAEDAYQFLDNWLERFPEYKGREFYITGESYAGHYVPQLAHAILRHASPDINLKGIMIGNAVINDWTDSKGMYDFFWTHALISDETADGISKNCNFTAYGAGVASNALCDAASDEVGESLADIDIYNIYAPNCQSEKLVTPPIAPSIDNFDPCTDYYVEAYLNRPDVQKALHANVTRLDHPWSACSDVLTRWVDSAKTVLPIIQELMKNSIRVWVYSGDTDGRVPVTSSRLSVNQLQLPVAAKWRPWFSSTKGAGEVGGYIVQYKGDLSLVTVRGAGHEVPSYQPRRALVLVQNFLAGKALPDCKECEQD

SEQ ID NO: 3164 - protein, 142 aa, Oryza sativa Japonica Group
MGKTRGMGAGRKLKTHRRNQRWADKAYKKSHLGNEWKKPFAGSSHAKGIVLEKIGIEAKQPNSAIRKCARVQLVKNGKKIAAFVPNDGCLNFIEENDEVLIAGFGRKGHAVGDIPGVRFKVVKVSGVSLLALFKEKKEKPRS

SEQ ID NO: 3165 - protein, 142 aa, Zea mays
MGKTRGMGAGRKLKTHRRNQRWADKAYKKSHLGNEWKKPFAGSSHAKGIVLEKIGIEAKQPNSAIRKCARVQLVKNGKKIAAFVPNDGCLNYIEENDEVLIAGFGRKGHAVGDIPGVRFKVVKVSGVSLLALFKEKKEKPRS

SEQ ID NO: 3166 - protein, 142 aa, Zea mays
MGKTRGMGAGRKLKTHRRNQRWADKAYKKSHLGNEWKKPFAVSSHAKGIVLEKIGIEAKQPNSAIRKCARVQLVKNGKKIAAFVPNDGCLNYIEENDEVLIAGFGRKGHAVGDIPGVRFKVVKVSGVSLLALFKEKKEKPRS

SEQ ID NO: 3167 - protein, 142 aa, Elaeis guineensis
MGKTRGMGAARKLKTHRRRQRWADKAYKKSHLGNEWKKPFAGSSHAKGIVLEKIGIEAKQPNSAIRKCARVQLIKNGKKIAAFVPNDGCLNFIEENDEVLIAGFGRKGHAVGDIPGVRFKVVKVSGVSLLALFKEKKEKPRS

SEQ ID NO: 3168 - protein, 142 aa, Elaeis guineensis
MGKTRGMGAARKLKTHRRRQRWADKAYKKSHLGNEWKKPFAGSSHAKGIVLEKIGIEAKQPNSAIRKCARVQLIKNGKKIAAFVPNDGCLNYIEENDEVLIAGFGRKGHAVGDIPGVRFKVVKVSGVSLLALFKEKKEKPRS

SEQ ID NO: 3169 - protein, 142 aa, Solanum tuberosum
MGKTRGMGAGRKLKSHRRRQRWADKSYKKSHLGNEWKKPFAGSSHAKGIVLEKIGIEAKQPNSAIRKCARVQLIKNGKKIAAFVPNDGCLNYIEENDEVLIAGFGRKGHAVGDIPGVRFKVVKVSGVSLLALFKEKKEKPRS

SEQ ID NO: 3170 - protein, 142 aa, Ricinus communis
MGKTRGMGAARKLKSHRRRQRWADKAYKKSHLGNEWKKPFAGSSHAKGIVLEKIGIEAKQPNSAIRKCARVQLIKNGKKIAAFVPNDGCLNYIEENDEVLIAGFGRKGHAVGDIPGVRFKVVKVSGVSLLALFKEKKEKPRS

SEQ ID NO: 3171 - protein, 142 aa, Vitis vinifera
MGKTRGMGAGRKLKSHRRRQRWADKAYKKSNLGNEWKKPFAGSSHAKGIVLEKIGIEAKQPNSAIRKCARVQLIKNGKKIAAFVPNDGCLNYIEENDEVLIAGFGRKGHAVGDIPGVRFKVVKVSGVSLLALFKEKKEKPRS

SEQ ID NO: 3172 - protein, 169 aa, Zea mays; identical to SEQ ID NO: 1551

SEQ ID NO: 3173 - protein, 173 aa, Sorghum bicolor
MTTSCEFAAVLALRSNRSRPSSPPPPLLPASVANKKPAASSSTSTRRWRCASSRRDDDADEFSCNGTGGGGGGGRMVDEGMVVLRRRIHEMEAPERGWEPPQEWAAWEKEWYATYDADVCHLLGVLQAFLVSSRPGVGVGLVAVLALAVPASAFVLVSLLLDASRAIVSSLHQ

SEQ ID NO: 3174 - protein, 462 aa, Sorghum bicolor
MAIVPNTPSPSPPCIYVLERTASLRARAPARSLHPIPGPQHEIHTPMAFISNDVVAMKAAAVSALLVFAAVASPAAGAPAVAVAGGAASMPAGPLDIAQLGAKGDGKSDSTPMILKAWKNACDATGVQKIVIPPGNYLTGGLELKGPCKSSIIIRLDGNLLGTGDLNAYKRNWIEIENVDNLSINGHGTIDGQGSLVWNKNDCQHSYNCKVLPNSLVLDFVTNAQIRGITLANSKFFHLNIFASKNVLIDKVTVKAPGNSPNTDGIHMGDSENVTISGTTIGVGDDCISIGPGSKTIRIDGVKCGPGHGISVGSLGRYKDEKDVEDVKVKGCTLVGTTNGLRIKSYEDSKSSPKVTKFVYEDVTMDNVSYPIIIDQKYCPNNICVRSGASKVAVTDVVFKNIHGTSNTPEAITLNCADNLPCQGVQLHNVDIKYNKSNNKTMAVCKNAVGKSFGLSKELACI

SEQ ID NO: 3175 - protein, 670 aa, Zea mays; identical to SEQ ID NO: 1552

SEQ ID NO: 3176 - protein, 669 aa, Oryza sativa Japonica Group
MEGGTKKVFTVQVEDGKPRKDGRPAVGPVFRSALSKDGFPPLEPDMKTSWDVFRVAAGKYPDNRMLGWRPVKDGVIGPYIWKSYREVYEEVLQVGSALQQLGVKPGSRIGIYGSNCPQWIVAMQACNGYSLICVPLYDTLGAGAVDFIIDHAEIDVIFVQDKKIKEILSANCKSAKRVKGLVAFTSGTSEEITSADQIGMKLYSWKDFLKMGKENPAQPCAPKPNDTCTIMYTSGTSGEPKGVMLSHESHAIYVKGVDLFMEQFDDKMTTDDVFLSFLPLAHILDRMIEEFFFHKGASVGYYHGDLNALRDDLMELKPTLLVGVPRVYEKIYEGILKALSELRPLRRLIFNALYNRKLANMKAGCTHKTASPFADMLAFRKVKARLGGRLRLLISGGAPLSNEIEEFLRVTSCAYFIQGYGLTETLGPSTVCYPDDMSLVGTVGVAATYTELRLEEVPEMGYNPLGTPSRGEICVRGNFFTGYYKNPELTNEVMADGWFHTGDIGEMNSDGILKVIDRKKNIFKLSQGEYVAVEYLEKVYVFPPTVEDVWVYGDSFRSMLVAVVNPHEENTMKWAESNGCKGSFAEICKSEGLKEHILKELQSVAAKNKLRGFEYVKGVILDPIPFDLERDLVTATMKKKRNNMLKYYKPEIEKVYQKLEEQRVAAKSK

SEQ ID NO: 3177 - protein, 665 aa, Oryza sativa Indica Group
MEGGTKKVFTVQVEDGKPRKDGRPAVGPVFRSALSKDGFPPLEPDMKTSWDVFRVAAGKYPDNRMLGWRPVKDGVIGPYIWKSYREVYEEVLQVGSALQQLGVKPGSRIGIYGSNCPQWIVAMQACNGYSLICVPLYDTLGAGAVDFIIDHAEIDVIFVQDKKIKEILSANCKSAKRVKGLVAFTSGTSEEITSADQIGMKLYSWKDFLKMGKENPAQPCAPKPNDTCTIMYTSGTSGEPKGVMLSHESHAIYVKGVDLFMEQFDDKMTTDDVFLSFLPLAHILDRMIEEFFFHKGASVGYYHGDLNALRDDLMELKPTLLVGVPRVYEKIYEGLIRTQISQKIILNALYNRKLANMKAGCTHKTASPFADMLAFRKVKARLGGRLRLLISGGAPLSNEIEEFLRVTSCAYFIQGYGLTETLGPSTVCYPDDMSLVGTVGVAATYTELRLEEVPEMGYNPLGTPSRGEICVRGNFFTGYYKNPELTNEVMADGWFHTGDIGEMNSDGILKVIDRKKNIFKLSQGEYVAVEYLEKVYVFPPTVEDVWVYGDSFRSMLVAVVNPHEENTMKWAESNGCKGSFAEICKSEGLKEHILKELQSVAAKNKLRGFEYVKGVILDPIPFDLERDLVTATMKKKRNNMLKYYKPEIEKVYQKLEEQRVAAKSK

SEQ ID NO: 3178 - protein, 605 aa, Oryza sativa Japonica Group
MLGWRPVKDGVIGPYIWKSYREVYEEVLQVGSALQQLGVKPGSRIGIYGSNCPQWIVAMQACNGYSLICVPLYDTLGAGAVDFIIDHAEIDVIFVQDKKIKEILSANCKSAKRVKGLVAFTSGTSEEITSADQIGMKLYSWKDFLKMGKENPAQPCAPKPNDTCTIMYTSGTSGEPKGVMLSHESHAIYVKGVDLFMEQFDDKMTTDDVFLSFLPLAHILDRMIEEFFFHKGASVGYYHGDLNALRDDLMELKPTLLVGVPRVYEKIYEGILKALSELRPLRRLIFNALYNRKLANMKAGCTHKTASPFADMLAFRKVKARLGGRLRLLISGGAPLSNEIEEFLRVTSCAYFIQGYGLTETLGPSTVCYPDDMSLVGTVGVAATYTELRLEEVPEMGYNPLGTPSRGEICVRGNFFTGYYKNPELTNEVMADGWFHTGDIGEMNSDGILKVIDRKKNIFKLSQGEYVAVEYLEKVYVFPPTVEDVWVYGDSFRSMLVAVVNPHEENTMKWAESNGCKGSFAEICKSEGLKEHILKELQSVAAKNKLRGFEYVKGVILDPIPFDLERDLVTATMKKKRNNMLKYYKPEIEKVYQKLEEQRVAAKSK

SEQ ID NO: 3179 - protein, 496 aa, Sorghum bicolor
MVLAQLGGSISRALAQMSNATVIDEKVLNDCLNEISRALLQADVQFKMVRDMQANIKRIVNLEALAAGTNKRRIMQQAVFTELCNMLDPGKPSFTPKKGKPSVVMFVGLQGSGKTTTCTKYAYYHQRKGFKPALVCADTFRAGAFDQLKQNATKAKIPFYGSYMESDPVKIAVEGVERFKKENCDLIIVDTSGRHKQEAALFEEMRQVSEATKPDLVIFVMDSSIGQAAFDQAQAFKQSVSVGAVIITKMDGHAKGGGALSAVAATKSPVIFIGTGEHIDEFEVFDVKPFVSRLLGMGDWSGFMDKIHEVVPTDQQPELLQKLSEGSFTLRLMYEQFQNILKMGPIGQVFSMLPGFSAELMPKGHEKESQAKIKRYMTMMDSMTEAELDSTNPKLMTESRIIRIARGSGRPVRDVMDMLEEYKRLAKIWGKMKGLKIPKKGEMSALSRNMNVQHMSKVLPPQMLKQIGGMGGLQSLMKQMGSKEMSGMFGGMGGER

SEQ ID NO: 3180 - protein, 496 aa, Zea mays
MVLAQLGGSISRALAQMSNATVIDEKVLNECLNEISRALLQADVQFKMVRDMQANIKRIVNLEALAAGTNKRRIMQQAVFTELCTMLDPGKPSFTPKKGKPSVVMFVGLQGSGKTTTCTKYAYYHQKKGFKPALVCADTFRAGAFDQLKQNATKAKIPFYGSYMESDPVKIAVEGVERFKKENCDLIIVDTSGRHKQEAALFEEMRQVSEATKPDLVIFVMDSSIGQAAFDQAQAFKQSVSVGAVIITKMDGHAKGGGALSAVAATKSPVIFIGTGEHIDEFEVFDVKPFVSRLLGMGDWAGFMDKIHEVVPTDQQPELLQKLSEGSFTLRLMYEQFQNILKMGPIGQVFSMLPGFSAELMPKGHEKESQAKIKRYMTMMDSMTDAELDSTNPKLMTESRIIRIARGSGRPVRDVIDMLEEYKRLAKIWGKMKGLKIPKKGEMSALSRNMNVQHMSKVLPPQMLKQIGGMGGLQSLMKQMGSKEMSGMFGGMGGER

SEQ ID NO: 3181 - protein, 496 aa, Oryza sativa Japonica Group
MVLAQLGGSISRALAQMSNATVIDEKVLSDCLNEISRALLQSDVQFKMVRDMQSNIKRIVNLETLAAGTNKRRIIQQAVFTELCNMLDPGKPSFTPKKGKPCVVMFVGLQGSGKTTTCTKYAYYHQRKGFKPALVCADTFRAGAFDQLKQNATKAKIPFYGSYMESDPVKIAVEGVERFKKENCDLIIVDTSGRHKQEAALFEEMRQVSEATKPDLVIFVMDSSIGQAAFDQAQAFKQSVSVGAVIVTKMDGHAKGGGALSAVAATKSPVIFIGTGEHIDEFEVFDVKPFVSRLLGMGDWSGFMDKIHEVVPTDQQPELLQKLSEGTFTLRLMYEQFQNILKMGPIGQVFSMLPGFSSELMPKGHEKESQAKIKRYMTMMDSMTDGELDSTNPKLMTESRILRIARGSGRPVRDVVDMLEEYKRLAKIWSKMKGLKIPKKGEMSALSRNMNVQHMSKVLPPQMLKQIGGMGGLQSLMKQMGSKEMGGMFGGMGGDK

SEQ ID NO: 3182 - protein, 496 aa, Oryza sativa Indica Group
MVLAQLGGSISRALAQMSNATVIDEKVLSDCLNEISRALLQSDVQFKMVRDMQSNIKRIVNLETLAAGTNKRRIIQQAVFTELCNMLDPGKPSFTPKKGKPCVVMFVGLQGSGKTTTCTKYAYYHQRKGFKPALVCADTFRAGAFDQLKQNATKAKIPFYGSYMESDPVKIAVEGVERFKKENCDLIIVDTSGRHKQEAALFEEMRQVSEATKPDLVIFVMDSSIGQAAFDQAQAFKQSVSVGAVIVTKMDGHAKGGGALSAVAATKSPVIFIGTGERIDEFEVFDVKPFVSRLLGMGDWSGFMDKIHEVVPTDQQPELLQKLSEGTFTLRLMYEQFQNILKMGPIGQVFSMLPGFSSELMPKGHEKESQAKIKRYMTMMDSMTDGELDSTNPKLMTESRILRIARGSGRPVRDVVDMLEEYKRLAKIWSKMKGLKIPKKGEMSALSRNMNVQHMSKVLPPQMLKQIGGMGGLQSLMKQMGSKEMGGMFGGMGGDK

SEQ ID NO: 3183 - protein, 497 aa, Ricinus communis
MVLAQLGGSISRAIQQMSNATIIDEKALNDCLNEITRALLQSDVQFKLVRDMQTNIKKIVNLDDLAAGHNKRKIIQQAIFNELCKMLDPGKPSFTPKKGKTSVVMFVGLQGSGKTTTCTKYAYYHQKKGWKPALVCADTFRAGAFDQLKQNATKAKIPFYGSYMESDPVKIAVEGVERFKKENCDLIIVDTSGRHKQEAALFEEMRQVSEATKPDLVIFVMDSSIGQAAFDQAQAFKQSVAVGAVIVTKMDGHAKGGGALSAVAATKSPVIFIGTGEHMDEFEVFDVKPFVSRLLGMGDWSGFMDKIHEVVPMDQQPELLQKLSEGNFTLRIMYEQFQNILKMGPIGQVFSMLPGFSAELMPKGREKESQAKIKRYMTMMDSMTNEELDSSNPKLMNDSRIMRIARGSGRQVREVMEMFEEYKRLAKIWSKMKGLKIPKKGEMSALSRNMNAQHMSKVLPPQMLKQIGGMGGLQNLMKQMGSAKDMMGMFGGGENKV

SEQ ID NO: 3184 - protein, 493 aa, Populus trichocarpa
MVLAQLGGSISRAIQQMSNATIIDEKALNDCLNEITRALLQSDVQFKLVRDMQTNIKKIVNLDDLAAGHNKRRIIQQAIFNELCKILDPGKSSFTPKKGKTSVVMFVGLQGSGKTTTCTKYAYYHQKKGWKPALVCADTFRAGAFDQLKQNATKAKIPFYGSYTESDPVKIAEEGVETFKKENCDLIIVDTSGRHKQEAALFEEMRQVSEATKPDLIIFVMDSSIGQAAFDQAQAFKQMVAVGAVIITKMDGHAKGGGALSAVAATKSPVIFIGTGEHMDEFEVFDVKPFVSRLLGMGDWSGFMDKIHEVVPMDQQPELLQKLSEGNFTLRIMYEQFQNLLKMGPIGQVFSMLPGFSAELMPKGHEKESQAKIKRYMTMMDSMTNEELDSSNPKLLNDSRMMRIARGAGRPIRDVMEILEEYKRLAKVWSKMKGLKIPKKGEMSSLSRNMNAQHMSKVLPPQMLKQIGGMGGLQNLMKQMGSAKDMMGMFGGG

SEQ ID NO: 3185 - protein, 495 aa, Vitis vinifera
MVLSELGGSISRALQQMSNATIIDEKVLNECLNEITRALLQSDVQFKLVRDMQTNIKKLVNFDDLAAGHNKRKIIQQAIFQELCKMLDPGKPSFTPKKGKTSVVMFVGLQGSGKTTTCTKYAYYHQKKGWKPALVCADTFRAGAFDQLKQNATKAKIPFYGSYMESDPVKIAVEGVERFKKENCDLIIVDTSGRHKQEAALFEEMRQVSEATRPDLVIFVMDSSIGQAAFDQAQAFRQSVAVGAVIITKMDGHAKGGGALSAVAATKSPVIFIGTGEHMDEFEVFDVKPFVSRLLGMGDWSGFMDKIHEVVPMDQQPELLQKLSEGNFTLRIMYEQFQNILKMGPIGQVFSMLPGFSAELMPKGREKESQAKIKRYMTMMDSMTNEELDTSNPKLMNESRIMRIARGSGRQVREVMEMLEEYKRLAKIWSKMKGLKIPKKGEMSALSRNMNAQHMSKIIPQQMLKQIGGMGALQNLMKQVGNNKDMLGMFGGGDK

SEQ ID NO: 3186 - protein, 491 aa, Populus trichocarpa
MVLAELGGSISRAIQQMSNATIIDEKALNDCLNEITRALLQSDVQFKLVRDMQTNIKKIVNLDDLAAGHNKRKIIQQAIFNELCKMLDPGKPSFTPKKGKTSVVMFVGLQGSGKTTTCTKYAYYHQKKGWKPALVCADTFRAGAFDQLKQNATKAKIPFYGSYMESDPVKIAVEGVERFKKENCDLIIVDTSGRHKQEVALFEEMRQVAEATKPDLVIFVMDSSIGQAAFDQAQAFKQSVAVGAVIVTKMDGHAKGGGALSAVAATKSPVIFIGTGEHMDEFEVFDVKPFVSRLLGMGDWSGFMDKIHEVVPMDQQPELLQKLSEGNFTLRIMYEQFQNLLKMGPIGQVFSMLPGFSSELMPKGREKESQAKIKRYMTMMDSMTNEGNSNPKLMNESRIMRIARGSGRSVRDVMEMLEEYKRLAKIWSKMKGLKIPKKGEMSALSRNMNAQHMSKVLPPQMLKQIGGMGGLQNLMKQMGSAKDMMGMFGGG

SEQ ID NO: 3187 - protein, 495 aa, Populus trichocarpa
MVLAQLGGSISRAIQQMSNATIIDEKALNDCLNEITRALLQSDVQFKLVRDMQTNIKKIVNLDDLAAGHNKRRIIQQAIFNELCKILDPGKSSFTPKKGKTSVVMFVGLQGSGKTTTCTKYAYYHQKKGWKPALVCADTFRAGAFDQLKQNATKAKIPFYGSYTESDPVKIAEEGVETFKKENCDLIIVDTSGRHKQEAALLEEMRQVSEATKPDLIIFVMDSSIGQAPFDQAQAFKQMVAVGAVIITKMDGHAKGGGALSAVAATKSPVIFIGTGEHMDEFEVFDVKPFVSRLLGMGDWSGFMDKIHEVVPMDQQPELLQKLSEGNFTLRIMYEQFQNLLKMGPIGQVFSMLPGFSAELMPKGHEKESQAKIKRYMTMMDSMTNEELDSSNPKLLNDSRMMRIARGAGRPIRDVMEMLEEYKRLAKVWSKMKGLKIPKKGEMSSLSRNMNAQHMSKVLPPQMLKQIGGMGGLQNLMKQMGSAKDMMGMFGGGDK

SEQ ID NO: 3188 - protein, 521 aa, Sorghum bicolor
MDATQLNRPMDATRLFLGALLLLLPAALLLLLRARGRRRLPPGPPSLPLLGSVVWLTNSPTEIEPLLRRLFERYGPVVALRIGARLFVFVADRRIAHEALVDRGAALADRPALASVRLLGENENSITRASYGPVWRLLRRNLVAETLHPSRVKLFTPARAWVRRVLVEKLGEPGPDAAPPRVVETFQYAMFCLLVLMCFGERLDEPAVRAIASAQREGLIYRSKNMQVFSFLPAVTKHLFRARLDKARELRRRVKELFVPLINARREYKKRGGEPKGETTFEHSYLDTLLDIKLHEDGDRPLTDDEICILCSEFLDAGTDTTSTGLQWIMAELVKNPAIQEKLYNEVKAAADNDKEGVSEEDVHKMPYLKAVILEALRKHPPAHFVLPHKAAEDMEIGGYLIPKGTTVNFMVAEMSRDEQEWKNPMEFSPERFLPGGDGEGVDVTGTKAIRMMPFGVGRRICAGLGIAMLHLEYFVANMVLEYEWKEVPGNEVDFAEKNEFTVVMKKPLRPRLVPRRSHLN

SEQ ID NO: 3189 - protein, 523 aa, Zea mays
MDATQLNRSMDATPTRLFLGALLFLVPAALLLLLRARGRRRLPPGPPSLPLLGSVVWLTNSPAEIEPLLRRLFERYGPVVALRVGARLSVFVADRRIAHEALVDRGATLADRPALASVKFLDESDNTITRASYGPVWRLLRRNLVAETLHPSRVKLFAPARAWVRRVLVEKLGEAGPDAAPPRVVETFQYAINCLLVLMCFGERLDEPAVRAIASAQREALIYRSKNMQVFAFLPAVTKHLFRARLDKARALRRRVKELFVPLINARREYKKRGEEPRRETTFEHSYVDTLLDIKLHEDGDRPLTDDEIILLCSEFLDAGTDTTSTGLQWIMAELVKNPAIQEKLYSEIKAATDDNKEGVSEEDVHSMPYLKAVILEGLRKHPPAHFVLPHKAAEEMEIGGYLIPKGTVVNFMVAEMGRDEQEWKNPMQFSPERFLPGGDGEGVDVTGTKAIRMMPFGVGRRICAGLGIAMLHLEYFVANMVREYEWKEVPGDEVDFAEKNEFTVVMKKPLRPRLVPRRSHLN

SEQ ID NO: 3190 - protein, 522 aa, Zea mays
MDATQLNRSMDATPTRLFLGALLLLVPAALLLLLRARGRRRLPPGPPSLPLLGSVVWLTNLPAEIEPLLRRLFERYGPVVALRVGARLSVFVADRRIAHEALVDRGATLADRPALASVKFLDESDNTITRASYGPVWRLLRRNLVAETLHPSRVKLFAPARAWVRRVLVEKLGEAGPDAAPPRVVETFQYAMFCLLVLMCFGERLDEPAVRAIASAQREALIYRSKNMQVFAFLPVVTKHLFRARLEKARALRRRVKELFVPLINARREYKKRGGEPRGETTFEHSYVDTLLDIKLHEDGDRPLTDDEIILLCSEFLDAGTDTTSTGLQWIMAELVKNPAIQEKLYSEIKAATDDKEGVSEEDVHKMPYLKAVILEGLRKHPPAHFVLPHKAAEEMEIGGYLIPKGTVVNFMVAEMGRDEQEWKNPMQFSPERFLPGGDGEGVDVTGTKAIRMMPFGVGRRICAGLGIAMLHLEYFVANMVREYEWKEVPGDEVDFAEKNEFTVVMKKPLRPRLVPRRSHLN

SEQ ID NO: 3191 - protein, 517 aa, Sorghum bicolor
MDATRLFLGALLLLLPAAFLLLLRARGRRRLPPGPPSLPLLGSVVWLTNSPAETEPLLRRLFERYGPVVALRIGARLSVFVADRRIAHEALVDRGAALADRPAFPEGRFLGEDDNIITRASYGPVWRLLRRNLVAETLHPSRVRLFAPARAWARRVLVHKLGEPGPDAAPPRVVDTFQYAMFFLLVLMCFGERLDEPAVHAIASALREPLIYRSKNMQVFSFLPAVTKHLFRARLDKALAMRRRIKELFLPLIDARREYKKRPGGEPPKGETTLEHSYVDTLLDMKIEEDGAQRPLTDDEIIRLCSEFLNAGTDTTSTGLQWIMAELVKNPAIQEKLYNEIMAATDEDKQEGVAEEDVHKMPYLKAVILEALRKHPPAHFVLPHKAAEDMEIGGYLIPKGTTVNFMVAEMSRDEQEWKNPMEFSPERFLPGGDGEGVDVTGTKAIRMMPFGVGRRICPGLGIAMLHLEYFVANMVREYEWKEVPGDEVDFAEKNEFTVVMKKPLRPRLVPRRSHLKS

SEQ ID NO: 3192 - protein, 508 aa, Hordeum vulgare subsp. vulgare
MDTWRIFLGSALLAIPLILLLRGRKGGRLRVPPGPPSLPVLGSVVWLTNSPADVEPLLRRLFSRYGPIVSLRVGSRLSIFVADRRLAHAALVERGATLADRPALPSLKLLGENNNTITRASYGPVWRLLRRNLVSETLHPSRVRLFAPARSWVRRVLAEKLRDESSSGGAAVVETFQYAMFCLLVLMCFGERLDEATVRAIAAAQREPLIYRSRKMAVFSFLPSVTKHLYRDRLQTVHAMQRRKKDLFVPLINARREYRKLGGEPKKESTFEHSYVDALLDIKLPEEGNRPLTDNEMINLCSEFLDAGTDTTSTGLQWIMAELVKNPAIQEKLYKEISATKGDDKEEVSEEDVHKMPYLKAVVLEGLRKHPPAHFVLPHKAAEDMEVGGYLIPKGATVNFMVAEMSRDEREWEKPTEFVPERFLPGGAGEAVDVTGNREIKMMPFGVGRRICAGLGIAMLHLEYFVANMVREFEWQEVPGEEVDFAEKNEFTVVMKKPLRPRLVPRSQ

SEQ ID NO: 3193 - protein, 523 aa, Oryza sativa Japonica Group
MDTWHVAVAAILVLIPFLRLILSRRGGRGGGKRGRLPPGPPAVPLLGSTVWLTNSLADAEPLLRRLIARHGPVVSLRVASRLLVFVADRRLAHAALVEKGASLADRPAMASTRLLGESDNLISRASYGPVWRLLRRNLVAETLHPSRVRLFAPARAWVRRVLVEKLRDENGDAAAPHAVVETFQYAMFCLLVLMCFGERLDEDAVRAIAVAQRDALLYLSSKMPVFAFFPAVTKHLFRGRLQKAHALRRRQTELFVPLINARREYKKRQGGANGEPKKETTFEHSYVDTLLDIKLPDDGNRPLTDDEMVNLCSEFLNAGTDTTSTALQWIMAELVKNPSIQSKLHDEIMAKTGGGGGGGQREVSEEDIHDMPYLKAVVLEGLRKHPPGHMVLPHRAAEDMEIGGYLIPKGTTVNFMVAEMGRDEKEWEKPMEFMPERFLAGGDGEGVDVTGSREIRMMPFGVGRRICAGLGVAMLHVEYFVANMVSEFEWKEVAGDEVDFAEKIEFTTVMAKPLRARLVPRRA

SEQ ID NO: 3194 - protein, 522 aa, Oryza sativa Indica Group
MDTWHVTVAAILVLIPFLRLILSRRGGRGGGKRGRLPPGPPAVPLLGSTVWLTNSLADAEPLLRRLIARHGPVVSLRVASRLLVFVADRRLAHAALVEKGASLADRPAMASTRLLGESDNLISRAGYGPVWRLLRRNLVAETLHPSRVRLFAPARAWVRRVLVEKLRDENGDAAAPRAVVETFQYAMFCLLVLMCFGERLDEDAVRAISVAQRDALLYLSSKMPVFAFFPAVTKHLFRGRLQKAHALRRRQMELFVPLINARREYKKRQGGADGEPKKETTFEHSYVDTLLDIKLPDDGNRPLTDDEMVNLCSEFLNAGTDTTSTALQWIMAELVKNPSIQAKLHDEIKSKTGGGGGGQREVSEEDIHDMPYLKAVVLEGLRKHPPGHMVLPHRAAEDMEIGGYLIPKGATVNFMVAEMGRDEKEWEKPMEFMPERFLAGGDGEGVDVTGSREIRMMPFGVGRRICAGLGVAMLHVEYFVANMVSEFEWKEVAGDEVDFAEKIEFTTVMAKPLRARLVPRRA

SEQ ID NO: 3195 - protein, 516 aa, Hordeum vulgare subsp. vulgare
MDTWQLFFGVILFALPLIILLLRNGKGGGGGGRRPIPPGPPSFPLLGSMVWLTNSPADGELLLRRLFARHGPIVSLRVGSRLSIFVADRRLAHAALVERGAALADRPTLASVTLLGENDNTITRASYGPVWRLLRRNLVSETLHPSRVRLFAPARSWVRRVLLDKLQDESSSGGAAVVETFQYAMFCLLVLMCFGERLDEPAVRAIAAAQRDQLLYITRKMTVFAFFPSLTKHVFRDRLRTAHAMRRRQKELFVPLINARRDYKSRGDEPRKETTFQHSYVDTLLDIKLPEECDRPLTDSEMVILCSEFLNAGTDTTSTGLQWIMAELVKNPEIQKKLHDEIKATTGDDDHEEVSGDDVHKMPYLKAVVLEGLRKHPPGHFVLPHKAAEDMEIGDYLIPKGATVNFMVAEMGRDEREWERPLEFSPERFLPGGAGEGMDVTGNREIKMMPFGVGRRICAGLGIAMLHLEYFVANMVKEFEWQEVAGEEVDFAEKNEFTVVMKKPLRSRLVPRTSRS

SEQ ID NO: 3196 - protein, 485 aa, Hordeum vulgare subsp. vulgare
MDTWRIFLGSALLAIPLILLLRGRKGGRLRVPPGPPSLPVLGSVVWLTNSPADVEPLLRRLFSRYGPIVSLRVGSRLSIFVADRRLAHAALVERGATLADRPALPSLKLLGENNNTITRASYGPVWRLLRRNLVSETLHPSRVRLFAPARSWVRRVLAEKLRDESSSGGAAVVETFQYAMFCLLALIYRSRKMAVFSFLPSVTKHLYRDRLQTVHAMQRRKKDLFVPLINARREYRKLGGEPKKESTFEHSYVDALLDIKLPEEGNRPLTDNEMINLCSEFLDAGTDTTSTGLQWIMAELVKNPAIQEKLYKEISATKGDDKEEVSEEDVHKMPYLKAVVLEGLRKHPPAHFVLPHKAAEDMEVGGYLIPKGATVNFMVAEMSRDEREWEKPTEFVPERFLPGGAGEAVDVTGNREIKMMPFGVGRRICAGLGIAMLHLEYFVANMVREFEWQEVPGEEVDFAEKNEFTVVMKKPLRPRLVPRSQ

SEQ ID NO: 3197 - protein, 487 aa, Sorghum bicolor
MDPNGLKTGGLLLPTIERRCTSPPSVIVIGGGISGVAAARALSNSSFKVTVLESRDRIGGRVHTDYSFGCPIDMGASWLHGVCNENSLAPLIGYLGLRLYRTSDDNSVLYDHDLESYALFDKDGNQVPKETVDKVGETFERILEETVKVRDEQEHDMPLLQAISIVFERHPHLKLEGLDDQVLQWCVCRLEAWFAADADEISLKNWDQERVLTGGHGLMVNGYYPVIEALAQGLDIRLNQRVTEITRQYNGVKVTTEDGTSYFADACIISVPLGVLKANVIKFEPELPSWKSSAIADLGVGVENKIAMHFDRVFWPNVEVLGMVGPTPKACGYFLNLHKATGNPVLVYMAAGRFAQEVEKLSDKEAVSLVVSHLKKMLPDASEPTQYLVSRWGSDPNSLGSYSCDLVGKPADVCARFSAPVDNLYFAGEAASAEHSGSVHGAYSSGIAAAEECRKRLLTLKGIPDLVQVAAWEEMAGAVAPLQICRT

SEQ ID NO: 3198 - protein, 487 aa, Zea mays
MDPNGLKTGGLLLPTIERRCTSPPSVIVIGGGISGVAAARALSNSSFKVTVLESRDRIGGRIHTDNSFGCPIDMGASWLHGVCNENPLAPLISYLGLRLYRTSDDNSVLYDHDLESYALFDKDGNQVPKETVDKVGETFERILEETVKVRDEQEHDMPLLQAISIVFERHPHLKLEGLDDQVLQWCVCRLEAWFAADADEISLKNWDQERVLTGGHGLMVNGYYPVIEALAQGLDIRLNQRVTEITRQHNGVKVTTEDGTSYLADACIISVPLGVLKANVIKFEPELPQWKSSAIADLGVGTENKIAMHFDRVFWPNVEVLGMVGPTPKACGYFLNLHKATGNPVLVYMAAGRFAQEVEKLSDKEAVGLVVSHLKKMLPDATEPTQYLVSRWGSDPNSLGSYSCDLVAKPADVCARFAAPVENLHFAGEAASAEHSGSVHGAYSSGIAAAEECRKRLLALKGIPDLVQVAAWEEMAGAVAPLQICRT

SEQ ID NO: 3199 - protein, 487 aa, Oryza sativa Japonica Group
MDPNSLKTGGLLLPTIERQCASPPSVIVIGGGISGVAAARALSNASFEVTVLESRDRVGGRVHTDYSFGCPIDMGASWLHGVCNENSLAPLIGYLGLKLYRTSGDNSVLYDHDLESYALFDKAGHQVSKETVAKVEETFERILDETVKVRDEQEHDMPLLQAISLVLERHPHLKLQGIDDQVLQWCVCRLEAWFAADADEISLKNWDQEHVLTGGHGLMVNGYYPIIQALAQGLDIRLNQRVTKIARQFNGVTVTTEDGTSYSADACIITVPLGVLKANIIKFEPELPSWKSSAIADLGVGIENKIAMHFDTVFWPNVEVLGMVGPTPKACGYFLNLHKATGNPVLVYMAAGRFAQEVEKLSDKEAVDLVMSHLKKMLPDATEPTKYLVSRWGSDPNSLGSYSCDLVGKPADVSARFAAPVENLYFAGEAASADHSGSVHGAYSSGIAAADECRKRILMQKGIPDLVQVKAYEEMAGVIAPLQICRT

SEQ ID NO: 3200 - protein, 491 aa, Sorghum bicolor
MDQPPNGFAAGGFFTHIDGQNRSPPSVIVIGGGISGIAAARALSNASFKVTLLESRDRVGGRVHTDYSFGCPIDMGASWLHGVCNENSLAPLIRMLGLRLYRTSGDNSVLYDHDLESYALFDKHGQQVPQEIVSKVGETFEKILKETVKVRDEHANDMPLIQAMAIVLNRNPHMKLEGLEYEVLQWCICRLEAWFATDMDNISLKNWDQEHVLTGGHGLMVNGYDPVIKALAQGLDIHLNHRVTKIIQRYNKVIVCVEDGASFVADAAIITVPLGVLKANIIKFEPELPREKLSAIADLGVGIENKIALKFNTVFWPNVEVLGRIAPTSNACGYFLNLHKATGNPVLVCMVAGRFAYEIEKLSDEESVNFVMSQLRKMLPQATEPVQYLVSRWGSDPNSLGSYSCDLVGKPADLYERFCAPVGNLFFAGEAACIDHSGSVHGAYSSGIAAAEDCRRRLSTQLGISDLFQVAKVVMREEMNEVMVPFQISRL

SEQ ID NO: 3201 - protein, 492 aa, Oryza sativa Japonica Group
MDQPSNGFAAGGLFLRHIDGQNASPPSVIVIGGGISGIAAARALSNASFKVTLLESRDRLGGRVHTDYSFGCPIDMGASWLHGVCNENSLAPLIRLLGLRLYRTSGDNSVLYDHDLESYALFDKDGRQVPQEIVTKVGETFEKILKETVKVRAEHEDDMPLIQAISIVLDRNPHLKLDGLQYEVLQWCICRLEAWFATDVDNISLKNWDQEHVLTGGHGLMVHGYDPVIKALAQDLDIHLNHRVTKIIQRYNKTIVCVEDGTSFVADAAIITVPLGVLKANIIKFEPELPDWKLSSISDLGIGIENKIALRFNSVFWPNVEVLGRVAPTSNACGYFLNLHKATGHPVLVCMVAGRFAYEFEKLSDEESVNFVMSQLKKMLPGATEPVQYLVSRWGTDPNSLGSYSCDLVGKPADLYERFCAPVGNLFFAGEAACIDHSGSVHGAYSSGIVAAEDCRRHLSTQLGISDLFQVGKIIMREEMTEVMVPFQISRL

SEQ ID NO: 3202 - protein, 496 aa, Oryza sativa Japonica Group
MWNKVPKIEVSKRVKGLFLRHIDGQNASPPSVIVIGGGISGIAAARALSNASFKVTLLESRDRLGGRVHTDYSFGCPIDMGASWLHGVCNENSLAPLIRLLGLRLYRTSGDNSVLYDHDLESYALFDKDGRQVPQEIVTKVGETFEKILKETVKVRAEHEDDMPLIQAISIVLDRNPHLKLDGLQYEVLQWCICRLEAWFATDVDNISLKNWDQEHVLTGGHGLMVHGYDPVIKALAQDLDIHLNHRVTKIIQRYNKTIVCVEDGTSFVADAAIITVPLGVLKANIIKFEPELPDWKLSSISDLGIGIENKIALRFNSVFWPNVEVLGRVAPTSNACGYFLNLHKATGHPVLVCMVAGRFAYEFEKLSDEESVNFVMSQLKKMLPGATEPVQYLVSRWGTDPNSLGSYSCDLVGKPADLYERFCAPVGNLFFAGEAACIDHSGSVHGAYSSGIVAAEDCRRHLSTQLGISDLFQVGKIIMREEMTEVMVPFQISRL

SEQ ID NO: 3203 - protein, 493 aa, Zea mays
MDQPPNGFAAGGFFTHIDGQNRSPPSVIVIGGGISGIAAARALSTASFKVTLLESRDRPGGRVHTDYSFGCPIDMGASWLHGVCNENSLAPLIRMLGLRLYRTSGDNSVLYDHDLESYALFDKHGQQVPQEIVSKVGETFERILKETVIVRDEHANDMPLFQAIAIVLDRNPHMKLQGLEYEVLQWCICRLEAWFATDMDNISLKTWDQEHVLTGGHGLMVNGYDPVIRALAQGLDIHLNHRVTKIIQRYNKVIVCVEDGASFVADAAIVTVPLGVLKANIIKFEPELPKEKLSAIADLGVGIENKIALKFDTVFWPDVEVIGRVAPTSNACGYFLNLNKATGNPVLVCMVAGRFAYEIEKLSDEESVNFVMSQLRNMLPQATDPVQYLVSRWGSDPNSLGSYSCDLVGKPADLYERFCAPVGSLFFAGEAACIDHSGSVHGAYSSGIAAAEDCRRRLSAQLGISAGLFQVGKAAMREEMTAEAMVPFQISRL

SEQ ID NO: 3204 - protein, 493 aa, Zea mays
MDQPPNGFAAGGFFTHIDGQNRSPPSIIVIGGGISGIAAARALSTASFNVTLLESRDRLGGRVHTDYSFGCPIDMGASWLHGVCNENSLAPLIRMLGLRLYRTSGDNSVLYDHDLESYALFDKHGQQVPQEIVSKVGETFERILKETVIVRDEHANDMPLFQAIGIVLDRNPHMKLQGLEYEVLQWCICRLEAWFATDMDNISLKTWDQEHVLTGGHGLMVNGYDPVIRALAQGLDIHLNHRVTKIIQRYNKVIVCVEDGASFVADAAIVTVPLGVLKANIIKFEPELPKEKLSAIADLGVGIENKIALKFDTVFWPDVEVIGRVAPTSNACGYFLNLNKATGNPVLVCMVAGRFAYEIEKLSDEESVNFVMSQLRNMLPQATDPVQYLVSRWGSDPNSLGSYSCDLVGKPADLYERFCAPVGSLFFAGEAACIDHSGSVHGAYSSGIAAAEDCRRRLSAQLGISAGLFQVGKAAMREEMTAEAMVPFQISRL

SEQ ID NO: 3205 - protein, 493 aa, Zea mays
MDQPPNGFAAGGFFTHIDGQNRSPPSVIVIGGGISGIAAARALSTASFKVTLLESRDRPGGRVHTDYSFGCPIDMGASWLHGVCNENSLAPLIRMLGLRLYRTSGDNSVLYDHDLESYALFDKHGQQVPQEIVSKVGETFERILKETVIVRDEHANDMPLFQAIAIVLDRNPHMKLQGLEYEVLQWCICRLEAWFATDMDNISLKTWDQEHVLTGGHGLMVNGYDPVIRALAQGLDIHLNHRVTKIIQRYNKVIVCVEDGASFVADAAIVTVPLGVLKANIIKFEPELPKEKLSAIADLGVGIENKIALKFDTVFWPDVEVIGRVAPTSNACGYFLNLNKATGNPVLMCMVAGRFAYEIEKLSDEESVNFVMSQLRNMLPQATDPVQYLVSRWGSDPNSLGSYSCDLVGKPADLYERFCAPVGSLFFAGEAACIDHSGSVHGAYSSGIAAAEDCRRRLSAQLGISAGLFQVGKAAMREEMTAEAMVPFQISRL

SEQ ID NO: 3206 - protein, 494 aa, Zea mays
MVLAQLGGSISRALAQMSNATVIDEKVLNDCLNEISRALLQADVQFKMVRDMQANIKRIVNLEALAAGTNKRRIMQQAVFTELCNMLDPGKPSFTPKKGKPSVVMFVGLQGSGKTTTCSKYAYYHQKKGFKPALVCADTFRAGAFDQLKQNATKAKIPFYGSYMESDPVKIAVEGVERFKKENCDLIIVDTSGRHKQEAALFEEMRQVSEATKPDLVIFVMDSSIGQAAFDQAQAFKQSVSVGAVIITKMDGHAKGGGALSAVAATKSPVIFIGTGEHIDDFEVFDVKPFVSRLLGMGDWSGFMDKIHEVIPTDQQPDLLQKLSEGSFSLRLMYEQFQNLLKMGPIGQVFSMLPGFSAELMPKGHEKESQAKIKRYMTMMDSMTDAELDSTNPKLMTESRIIRIARGSGRPVRDVMDMLEEYKRLAKIWGKMKGLKLQKKGDMSALTRNMNVQQMSKALPPQMLKQIGGMGGLQSLMKQMGSKEMSGMFGGMGG

SEQ ID NO: 3207 - protein, 315 aa, Sorghum bicolor
MEGLAGSRGGGGCGGLDAQIEQLMECRPLAETEVKTLCEKAKEILMEESNVQPVKSPVTICGDIHGQFHDLVELFRIGGKCPDTNYLFMGDYVDRGYYSVETVTLLVALKVRYPQRITILRGNHESRQITQVYGFYDECLRKYGSANVWKIFTDLFDYFPLTALVESEIFCLHGGLSPSIENLDSVRSLDRVQEVPHEGPMCDLLWSDPDDRCGWGISPRGAGYTFGQDISEQFNHTNNLKLVARAHQLVMEGYNWAHEQKVVTIFSAPNYCYRCGNMASILEVDDCRNHTFIQFEPAPRRGEPDVTRRTPDYFL

SEQ ID NO: 3208 - protein, 315 aa, Zea mays
MEDLASSRGGGGCGGLDAQIEQLMECRPLPETEVKTLCEKAKEILMEESNVQPVKSPVTICGDIHGQFHDLLELFRIGGKCPDTNYLFMGDYVDRGYYSVETVTLLVALKVRYPQRITILRGNHESRQITQVYGFYDECLRKYGSANVWKIFTDLFDYFPLTALVESEIFCLHGGLSPSIENLDNVRSLDRVQEVPHEGPMCDLLWSDPDDRCGWGISPRGAGYTFGQDISEQFNHTNNLKLVARAHQLVMEGYNWAHEQKVVTIFSAPNYCYRCGNMASILEVDDCRNHTFIQFEPAPRRGEPDVTRRTPDYFL

SEQ ID NO: 3209 - protein, 313 aa, Sorghum bicolor
MEPMNVDNGGCGGLDAQIEQLMQCRPLAEQEVKALCEKAKEILMEESNVQPVKSPVTICGDIHGQFHDLVELFRIGGKCPDTNYLFMGDYVDRGYYSVETVTLLVALKVRYPHRITILRGNHESRQITQVYGFYDECLRKYGNANVWKTFTDLFDYFPLTALVESEIFCLHGGLSPSIENLDSVRSLDRVQEVPHEGPMCDLLWSDPDDRCGWGISPRGAGYTFGQDISEQFNHTNNLKLVARAHQLVMEGYNWAHEQKVVTIFSAPNYCYRCGNMASILEVDDCNSHTFIQFEPAPRRGEPDVTRRTPDYFL

SEQ ID NO: 3210 - protein, 313 aa, Zea mays
MEPMNVDNGGCGGLDAQIEQLMQCRPLAEQEVKALCEKAKEILMEESNVQPVKSPVTICGDIHGQFHDLVELFRIGGKCPDTNYLFMGDYVDRGYYSVETVTMLVALKVRYPHRITILRGNHESRQITQVYGFYDECLRKYGNANVWKTFTDLFDYFPLTALVESEIFCLHGGLSPSIENLDSVRSLDRVQEVPHEGPMCDLLWSDPDDRCGWGISPRGAGYTFGQDISEQFNHTNNLKLVARAHQLVMEGYNWAHEQKVVTIFSAPNYCYRCGNMASILEVDDCNSHTFIQFEPAPRRGEPDVTRRTPDYFL

SEQ ID NO: 3211 - protein, 315 aa, Oryza sativa Indica Group
MEESVGSRGGSGGGGLDAQIEQLMECRPLSETEVKTLCEKAKEILMEESNVQPVKSPVTICGDIHGQFHDLVELFRIGGKCPDTNYLFMGDYVDRGYYSVETVTLLVALKVRYPQRITILRGNHESRQITQVYGFYDECLRKYGSANVWKIFTDLFDYFPLTALVESEIFCLHGGLSPSIDNLDSVRSLDRVQEVPHEGPMCDLLWSDPDDRCGWGISPRGAGYTFGQDISEQFNHSNNLKLVARAHQLVMEGYNWAHEQKVVTIFSAPNYCYRCGNMASILEVDDCRNHTFIQFEPAPRRGEPDVTRRTPDYFL

SEQ ID NO: 3212 - protein, 313 aa, Zea mays
MEPMNVDNGGSGGLDAQIEQLMQCRPLAEQEVKALCEKAKEILMEESNVQPVKSPVTICGDIHGQFHDLVELFRIGGKCPDTNYLFMGDYVDRGYYSVETVTMLVALKVRYPHRITILRGNHESRQITQVYGFYDECLRKYGNANVWKTFTDLFDYFPLTALVESEIFCLHGGLSPSIENLDSVRSLDRVQEVPHEGPMCDLLWSDPDDRCGWGISPRGAGYTFGQDISEQFNHTNNLKLVARAHQLVMEGYNWAHEQKVVTIFSAPNYCYRCGNMASILEVDDCNSHTFIQFEPAPRRGEPDVTRRTPDYFL

SEQ ID NO: 3213 - protein, 313 aa, Triticum aestivum
MEPMSVDSSGCGGLDAQIEQLLQCRPLAEQEVKALCEKAKEILMEESNVQPVKSPVTICGDIHGQFHDLVELFRIGGKCPDTNYLFMGDYVDRGYYSVETVSLLVALKVRHPHRITILRGNHESRQITQVYGFYDECLRKYGNANVWKIFTDLFDYFPLTALVESEIFCLHGGLSPSIENLDSVRSLDRVQEVPHEGPMCDLLWSDPDDRCGWGISPRGAGYTFGQDISEQFNHTNNLKLVARAHQLVMEGYNWAHEQKVVTIFSAPNYCYRCGNMASILEVDDCNAHTFIQFEPAPRRGEPDVTRRTPDYFL

SEQ ID NO: 3214 - protein, 313 aa, Zea mays
MDPMNVDNGGCGGLDAQIEQLMQCRPLAEQEVKALCEKAKEILMEESNVQPVKSPVTICGDIHGQFHDLVELFRIGGKCPDTNYLFMGDYVDRGYYSVETVTLLVALKVRYPHRITILRGNHESRQITQVYGFYDECLRKYGNANLWKTFTDLFDYFPLTALVESEIFCLHGGLSPSIENLDSVRSLDRVQEVPHEGPMCDLLWSDPDDRCGWGISPPGAGYTFGQDISEQFNHTNNLKLVARAHQLVMEGYNWAHEQKVVTIFSAPNYCYRCGNMASILEVDDCNSHTFIQFDPAPRRGEPDVTRRTPDYFL

SEQ ID NO: 3215 - protein, 314 aa, Oryza sativa Japonica Group
MEPMSVDGGGGCGGLDTQIEQLMQCRPLAEQEVKALCEKAKEILMEESNVQPVKSPVTICGDIHGQFHDLVELFRIGGKCPDTNYLFMGDYVDRGYYSVETVTLLVALKVRHPHRITILRGNHESRQITQVYGFYDECLRKYGNANVWKIFTDLFDYFPLTALVESEIFCLHGGLSPSIENLDSVRSLDRVQEVPHEGPMCDLLWSDPDDRCGWGISPRGAGYTFGQDISEQFNHTNNLKLVARAHQLVMEGYNWAHEQKVVTIFSAPNYCYRCGNMASILEVDDCNSHTFIQFEPAPRRGEPDVTRRTPDYFL

SEQ ID NO: 3216 - protein, 804 aa, Zea mays
MPSLQCQSIQEELQSRLCKKIPKKNKNKKSTIGPESDDDTFDDMDGKKKSKIPALVLWYLPVIYRLKRLFSNHREAELMRWHAENRKQNNKQIRHPADASQWKNFDLMYPEFAKETRNVRFALGIDGMNPFGEKRSVHSTWPVTLTMYNLPSWLCHKRKYIMLTILIQGPKSAGVDIDVFLEPLMEDMTKLWNEGVRIWDEYCHEYFNLRAIIFVTIHDSPGGATLSGQKTKGKNGCVVCVDGTASMYLKSSKKLVFMGHRRFLMKQHKYRKMKEEFNNQLESEGAPKPYSGKLVFEIVKNIHVVFGKEKNKGEKRKRIDPSTYTTFKKQSIFFKYLPYWKDMEICHSIDLMHVTKNVFDSIIGTLLGMPSKTKDGLKSRNDLVDLQIRPELHPVDSGKGKPYLPPASYNLLVEERTKICKCLRGVKVPTGFSSNISKLLRMKDLSLFGYNSHDCHVMMTVFLPIVVRALETEHVKVVITRLCYFFNAVSQKVIALEDLDYLKAYIIEAMCKLEMCFPPSFFDMQVHLIIHLVDQIKILGPLYLHHMFQLERYLGVLKGYVRNHAHPEGSIMEGYTTEEVIESCIDYISDGTMIGVPVPKHEGKLCGRGRMGKKTFRVEDYKLVHCAHGSVLQHLTIAEPYIEEHLDELRKENQNRTEDWIMREHKHRFSEWLMDKNIPFGDSLEEKTMKNLASGPSCFVTSWQAYDINGYTFYTKSKNMKSVAQNSGVRIDAFDLHGQKTTYFGFIEEIWELDYGPSMKIPLFKCQWVQHPVGVIVDNYGLTLVDLKKVGYKDNPWVLAECVA

SEQ ID NO: 3217 - protein, 487 aa, Zea mays
MDPNGLKTGGLLLPTIERRCTSPPSVIVIGGGISGVAAARALSNSSFKVTVLESRDRIGGRIHTDNSFGCPIDMGASWLHGVCNENPLAPLISYLGLRLYRTSDDNSVLYDHDLESYALFDKDGNQVPKETVDKVGETFERILEETVKVRDEQEHDMPLLQAISIVFERHPHLKLEGLDDQVLQWCVCRLEAWFAADADEISLKNWDQERVLTGGHGLMVNGYYPVIEALAQGLDIRLNQRVTGITRQHNGVKVTTEDGTSYLADACIISVPLGVLKANVIKFEPELPQWKSSAIADLGVGTENKIAMHFDRVFWPNVEVLGMVGPTPKACGYFLNLHKATGNPVLVYMAAGRFAQEVEKLSDKEAVGLVVSHLKKMLPDATEPTQYLVSRWGSDPNSLGSYSCDLVAKPADVCARFAAPVENLHFAGEAASAEHSGSVHGAYSSGIAAAEECRKRLLALKGIPDLVQVAAWEEMAGAVAPLQICRT

SEQ ID NO: 3218 - protein, 504 aa, Sorghum bicolor
MSESEATLEDTPTWIVASVCSVIVLISFVFERALHRLGKALQRRRKTLYEALLKLKEELMLLGFVSLLLVVFQELIQKICIDEGLMEHWLPCRGASATTTSASEATVRHGVSSSAVVVGGGRRMLKGGGAAFGHCSSKGKVPLLSLHALEQVHIFIFVLAISQVVLSVATVLLGLLQMRIWMHWENTIQEEGSSAPKMIARVQKIRFVQDWCKGYEKVTWVIIWLRSFFKQFYGSVSNDDYIAMRLGFVMEHFRGHPKFNFYDYMIKALEKDFKRVVSIKWYYWIFVMIFLLLNITGWHSYFWISLVPLALLLLIGTKLEHIINKLAYEVASKHAAGQGGEGGIVVSPSDELFWFHSPRLVLVLIHFILFQNAFEFAYFFWTLAMFGVNSCIMDSLGYSVSRIIICVVVQVLCSYSTLPLYAIVSHMGSSFKSAVFADDVAEHLRGWADGARRRVRRSATDVDATASCLGTPAAGRRGWEGAAAGWRLVAGRSRPTQQPRSISF

SEQ ID NO: 3219 - protein, 496 aa, Zea mays
MSEEATLEDTPTWIVASVCSVIVLISFVFERALHHLGKALERRRKTLYEALLKLKEELMLLGFVSLLLVVSQDLIQKICIDDSLMEHWMPCRGASATASAHYGVSSSSSSSAVGGGRRMLKGGGAAFGHCSSKGKVPLLSLHALEQVHIFIFVLAITQVVLSVATVLLGLLQMRIWMHWENTIQQEGSSAPKMIARVQKIRFIQDRCKGYEKAAWVIIWLRSFFKQFYGSVSNDDYIAMRLGFVMEHFRGHPKFNFYDYMIKALEKDFKRVVSIKWYYWIFVMIFLLLNVTGWHSYFWISLVPLALLLLIGTKLEHIINRLAYEVASKHAAGQGEGGIVVSPSDELFWFRSPRLVLVLIHFILFQNAFEFAYFFWTLAMFGANSCIMDSLGYSVSRIIICVVVQVLCSYSTLPLYAIVSHMGSSFKSAVFVDDVADNLRGWADGARRRVRRSATGVDASCLGTPAAAGRGWEGAAGWRLIAGRPSRPTQQPRSISF

SEQ ID NO: 3220 - protein, 487 aa, Oryza sativa Indica Group
MAATEATTIEDTPTWIVAAVCSAIVLISFAFERSLHYLGKALERRRRTLYEALLKLKEELMLLGFISLLLVVFQEPIQRICIAESLMGHWLPCRSDGKASSHHGVAAASAAVVSGAGARRLLGEGTAGSGHCSSKGKVPLLSLHAIEQIHIFIFVLAVTHVVLSAVTVLLGLLQMRRWRHWENAIKADGDFGPKMINRAQQFKFIQDRYKGFHKVTMVIIWMRSFFKQFYGSVTKDDYTAMRLGFVMEHFRGHPKFNFYDYMIKALEKDYKRVVGIKWYLWIFVMIFLLLNITGWHSYFWISLIPLVLLLLIGTKLEHIITQLAYEVATKHTAVEGDIAVSPSDNLFWFHSPRLVLALLHFILFQNAFEFAYFIWTMATFGFNSCIMDRLPYRVSRIVICVVVQVLCSYSTLPLYAIVSHMGSSFKSAVFSDDVADNLREWADEARRRTGRAAAGVGCLGAAAGSSRREGITYKTCERGNKRYTVLR

SEQ ID NO: 3221 - protein, 476 aa, Oryza sativa Japonica Group
MAATEATTIEDTPTWIVAAVCSAIVLISFAFERSLHYLGKALERRRRTLYEALLKLKEELMLLGFISLLLVVFQEPIQRICIAESLMGHWLPCRSDGKASSHHGVAAASAAVVSGAGARRLLGEGTAGSGHCSSKGKVPLLSLHAIEQIHIFIFVLAITHVVLSAVTVLLGLLQMRRWRHWENAIKADGDFGPKMINRAQQFKFIQDRYKGFDKVTMVIIWMRSFFKQFYGSVTKDDYTAMRLGFVMEHFRGHPKFNFYDYMIKALEKDYKRVVGIKWYLWIFVMIFLLLNITGWHSYFWISLIPLVLLLLIGTKLEHIITQLAYEVATKHTAVEGDIAVSPSDNLFWFHSPRLVLALLRFILFQNAFEFAYFIWTMATFGFNSCIMDRLPYRVSRIVICVVVQVLCSYSTLPLYAIVSHMGSSFKSAVFSDDVADNLRKWADEARRRTGRAAAGVGCLGAAAGSSRREGIHIQNM

SEQ ID NO: 3222 - protein, 403 aa, Sorghum bicolor
MAPLLLSLPLRLRPIPAAAGSSTSRIAPRPRSPRPFPRRRLLLRLPALQAQVQCLAAPAGGPDAPAPTPRWHAALSAAAGLYPASVAVARPEAFRWFVALAPGSYTATLGFIMLAMGLALQLRDFAALLRDRPLAILFGCAAQYAIMPAFGAIVSHALGLPPPLSAGLILLGCCPGGTASNVVTLVAQGDVPLSIVMTVCSTLAAVFLTPLLTKILAGAYIPVDAVKLSLSTLQVVVAPILLGSSIQTAFPSVVQFVTPFAPLMAVLASSLLACSVFSENFVRLRSTIADASSVSGNFFSRDIGIVMLSVFLLHFAGFFVGYAAAAIGGFKEKQRRAISIEVGMQNSSLGVVLATAHFSSPLVALPPALSAVIMNMMGSTLGLIWQSISPSVSENETTDITNA

SEQ ID NO: 3223 - protein, 396 aa, Zea mays
MAPLLLLPLPLPLRPIPAENSISRLAPRPRFPRPFSRRRLRLPALLQVQCLAATGPAAPAPRWHAALSAAAGLYPAYVAAGASVAFTRPEAFRWFVALAPGSYTATLGFIMLAMGLTLQLSDFAALLRDRPLAILFGCAAQYTIMPAFGAIISHALGLPPSLSAGLILLGCCPGGTASNVVTLVAQGDVPLSVVMTVCSTLAAVFLTPLLTKILAGAYIPVDAVKLSLSTLQVVVAPILLGSLIQTAFPSVAQFLSPFAPLMAVLASSLLASSVFSENFVRLRSTIADASPVNGMFFGDVGTVIFSVFLLHFAGFFVGYAAAAIGGFKEKQRRAISIEVGMQNSSLGVVLATAHFSSPLVALPPAVSAVVMNMMGSTLGLVWQYTSTSVSENETSA

SEQ ID NO: 3224 - protein, 395 aa, Zea mays
MAPLLLLLPLPLRPIPAENSISRLAPRPRFPRPFSRRRLRLPALLQVQCLAATGPAAPAPRWHAALSAAAGLYPAYVAAGASVAFTRPEAFRWFVALAPGSYTATLDFIMLAMGLTLQLSDFAALLRDRPLAILFGCAAQYTIMPVFGAIISHALGLPPSLSAGLILLGCCPGGTASNVVTLVAQGDVPLSVVMTVCSTLAAVFLTPLLTKILAGAYIPVDAVKLSLSTLQVVVAPILLGSLIQTAFPSVAQFLSPFAPLMAVLASSLLASSVFSENFVRLRSTIADASPVNGMFFGDVGTVIFSVFLLHFAGFFVGYAAAAIGGFKEKQRRAISIEVGMQNSSLGVVLATAHFSSPLVALPPAVSAVVMNMMGSTLGLVWQYTSTSVSENETSA

SEQ ID NO: 3225 - protein, 397 aa, Oryza sativa Japonica Group
MAPLLLLLPPLRLLPATLLRATSRPASPRRGLSYSYPRRVAAVLRQCRAAAPPPPAPPDAVPRWHAALAAAAGLYPAYVTAGAAVAVARPDAFRWFVALAPGSYTFALGLIMLAMGLTLELREFLALLRERPLSILFGCAAQYTIMPAFGAIVSRVLGLSPPISVGLILLGCCPGGTASNVVTLVAKGDVPLSIVMTVCSTLGAVFLTPLLTKILAGAYVPVDAVKLSLSTLQVVVAPILLGSSIQSAFPSVVKFVTPFAPLLAVLTSSLLACSVFSENFVRLRSTIADASYGNGGLFSGDIGVVMLSVFLLHCAGFVVGYTTAAIGGFKERQRRAISIEVGMQNSSLGVVLATAHFSSSLVALPAALSAVIMNIMGSTLGLVWQFMTPPDSKNENR

SEQ ID NO: 3226 - protein, 343 aa, Oryza sativa Japonica Group
GIKEEEKKTKKSFERRGRRVQELGEKGMDPVLLDDIIRRLIEVKNLKPGKNAQLSESEIKQLCATSKEIFLNQPNLLELEAPIKICGDVHGQYSDLLRLFDYGGYPPQSNYLFLGDYVDRGKQSLETICLLLAYKIKYPENFFLLRGNHECASVNRIYGFYDECKRRFSVKLWKTFTDCFNCLPVAALIDEKILCMHGGLSPELNKLDQILNLNRPTDVPDTGLLCDLLWSDPSNDAQGWAMNDRGVSYTFGPDKVSEFLEKHDLDLICRAHQVVEDGYEFFANRQLVTIFSAPNYCGEFDNAGAMMSVDDTLMCSFQILKPARKMLGGSTNSKSGFKSLRGW

SEQ ID NO: 3227 - protein, 316 aa, Oryza sativa
MDPVLLDDIIRRLIEVKNLKPGKNAQLSESEIKQLCATSKEIFLNQPNLLELEAPIKICGDVHGQYSDLLRLFDYGGYPPQSNYLFLGDYVDRGKQSLETICLLLAYKIKYPENFFLLRGNHECASVNRIYGFYDECKRRFSVKLWKTFTDCFNCLPVAALIDEKILCMHGGLSPELNKLDQILNLNRPTDVPDTGLLCDLLWSDPSNDAQGWAMNDRGVSYTFGPDKVSEFLEKHDLDLICRAHQVVEDGYEFFANRQLVTIFSAPNYCGEFDNAGAMMSVDDTLMCSFQILKPARKMLGGSTNSKSGFKSLRGW

SEQ ID NO: 3228 - protein, 316 aa, Zea mays
MDPALLDDVIRRLLEVKNLKPGKNAQLSESEIKQLCAAAKEIFLQQPNLLELEAPIKICGDVHGQYSDLLRLFDYGGYPPQANYLFLGDYVDRGKQSLETICLLLAYKVKYPENFFLLRGNHECASVNRIYGFYDECKRRFSVKLWKTFTDCFNCLPVSALIDEKILCMHGGLSPELNKLEQILNLNRPTDVPDTGLLCDLLWSDPSNEATGWAINDRGVSFTFGPDKVSEFLEKHDLDLICRAHQVVEDGYEFFASRQLVTIFSAPNYCGEFDNAGAMMSVDDTLMCSFQILKPARKMMGGSTNNKSGFKSFRGW

SEQ ID NO: 3229 - protein, 360 aa, Ricinus communis
MDQTVLDDIIKRLLEVRGKPGKQVQLSEAEIRQLCVVSREIFLQQPNLLELEAPIKICGDIHGQYSDLLRLFEYGGLPPHANYLFLGDYVDRGKQSLETICLLLAYKIKYPENFFLLRGNHECASINRIYGFYDECKRRFNVRLWKIFTDCFNCLPVAALIDEKILCMHGGLSPDLNHLDQIRNLQRPTDVPDTGLLCDLLWSDPSKDVQGWGMNDRGVSYTFGPDKVTEFLEKHDLDLICRAHQVVEDGYEFFANRQLVTIFSAPNYCGEFDNAGAMMSVDETLMCSFQILKPADKKSKFNFGSTTTAKPGNTSGVGIFGSTTTAKPGNSPAGVKISSIYVLLVSGRYNLDISIFNVWR

SEQ ID NO: 3230 - protein, 341 aa, Vitis vinifera
MDPSVLDDIINRLREVRLRPGKQVQLSESEIRQLCVVSREIFLKQPNLLELCAPIKICGDIHGQYSDLLRLFDYGGFPPQANYLFLGDYVDRGKQSLETICLLLAYKIRYPENFFLLRGNHECASINRIYGFYDECKRRFNVRLWKIFTDCFNCLPVAARIDDKILCMHGGLSPDLHNLDQIRNLQRPTDVPDTGLLCDLLWSDPSNDIQGWGMNDRGVSYTFGPDKVTEFLEKHDLDLVCRAHQVVEDGYEFFANRQLVTIFSAPNYCGEFDNAGAMMSVDDTLMCSFQILKPAVKKLKFSFGSTTTTKPGNSPEVFGSTTTTKPGNTPTGVKSFLGAKV

SEQ ID NO: 3231 - protein, 319 aa, Vitis vinifera
MDPSVLDDIINRLREVRLRPGKQVQLSESEIRQLCVVSREIFLKQPNLLELCAPIKICGDIHGQYSDLLRLFDYGGFPPQANYLFLGDYVDRGKQSLETICLLLAYKIRYPENFFLLRGNHECASINRIYGFYDECKRRFNVRLWKIFTDCFNCLPVAARIDDKILCMHGGLSPDLHNLDQIRNLQRPTDVPDTGLLCDLLWSDPSNDIQGWGMNDRGVSYTFGPDKVTEFLEKHDLDLVCRAHQVVEDGYEFFANRQLVTIFSAPNYCGEFDNAGAMMSVDDTLMCSFQILKPAVKKLKFSFGSTTTTKPGNSPEDVK

SEQ ID NO: 3232 - protein, 326 aa, Glycine max
MDQALVDDIINRLLEVRGRPGKQVQLSESEIRQLCAASREIFLQQPNLLELEAPIKICGDVHGQYSDLLRLFEYGGLPPEANYLFLGDYVDRGKQSLETICLLLAYKIKYPENFFLLRGNHECASINRIYGFYDECKRRFNVRLWKTFTECFNCLPVAALIDEKILCMHGGLSPDLLNLDQIRNLQRPTDVPDTGLLCDLLWSDPSKEVQGWGMNDRGVSYTFGADKVSEFLQKHDLDLICRAHQVVEDGYEFFANRQLVTIFSAPNYCGEFDNAGAMMSVDETLMCSFQILKPADKKVKLNFGSTTTTKPGNSPAGVKSFLGTKV

SEQ ID NO: 3233 - protein, 337 aa, Populus trichocarpa
MEQAVLDDIIKRLLEVRGKPGKQVQLSESEIRQLCVVSREIFLQQPNLLELEASIKICGDIHGQYSDLLRLFEYGGFPPHANYLFLGDYVDRGKQSLETICLLLAYKIKYPENFFLLRGNHECASINRIYGFYDECKRRFNVRLWKTFTECFNCLPVAALIDEKILCMHGGLSPELNHLDQIRNLQRPTDVPDTGLLCDLLWSDPSKDVQGWGMNDRGVSYTFGPDKVTEFLQKQDLDLICRAHQVVEDGYEFFANRQLVTIFSAPNYCGEFDNAGAMMSVDETLMCSFQILKPADKKSKFKAGNTSTGAGLFGSTTTAKPGNPLPGVKVNALLRKT

SEQ ID NO: 3234 - protein, 385 aa, Zea mays
MSFSSMSKQQVLDAGDGEGEEVMELIPGLPEEVAEKCLLHLPFLYHRLFRTVSSTWNRFLTDALAKPLLFPHAAGAGTAATGSVPFLFALAFDPMSRRLQCQALDRFSRKWLLLPPVPGGAAAGSFAVVGLPRRGQIYVIGGVEEGGDKAVTSVAVYSAARNGWEEAAAMRTPRGYMAAGEVGGRVVVAGEDGEAEVFDPEAGRWSPAAPRRGAAVARYDAAAAGGKLYVTEGWAWPFERAPRGAVYDAAADSWCEMARGMREGWTGSCAVAGGRMYIVAEYGEWRLKRYDEARDEWRMVAGTGVPPEVRRPHVVAGELGEVAGGRRRIYVVGAGLDVAVGTVSAAASAAAAVPGVEDEVVEWEVVKGSAEFAGMAPCNAQVLYA

SEQ ID NO: 3235 - protein, 394 aa, Zea mays
MSFSSMSKQQVLDAGDGEGEEVVELIPGLPEEVAEKCLLHLPFLYHRLFRTVSSTWNRFLTDSPAKPLLFTPAEGAGAGAGSAAMGSLSLSLPFLFAFAFDPVSRRLQCQALDPFSRRWLLLPPVPGGAAAGSFAVVGLPRRGEIYVIGGVEEGSDKAVTSVAVYSAARNGWEEAAAMRTPRGYMAAGEVGGRVVVAGEDGEAEVFDPDAGRWSPAAPRRGAAVAWYDAAAAGGKLYVTEGWAWPFERAPRGAVYDSATDSWCEMARGMREGWTGSCAVAGGRMYIVAEYGEWRLKQYDEARDEWRMVAGSGVPPEVRRPHVVAGEIGEVAGGRRRIYVVGAGLDVAVGTVSASDTAAAPGVHGVEEEVVEWEVVKGPTEFVGLAPCNAQVLYA

SEQ ID NO: 3236 - protein, 393 aa, Sorghum bicolor
MSFSSMSKQQVLDTGDGEGEEVMELIPGLPEDVAEKCLLHLPFLYHRLFRTVSSTWNRFLTDAPAKPLLFPPAAAGPGAGTAATGSVSFSLPFLFAFAFDPVSRRLQCQALDPFSRRWLLLPPVPGGGAAAGSFAVVGLPRRGEIYVIGGVEEGGSDKAVTSVAVYSAARNGWEEAASMRTPRGYMAAGEVGGRVVVAGEDGEAEVFDPEAGRWSPAAPRRGAAVARYDAAAAGGKLYVTEGWAWPFERAPRGAVYDAAADSWCEMARGMREGWTGSCAVAGGRMYIVAEYGEWRLKRYDEGRDEWRMVAGSGVPPEVRRPHVVAGEVGEVAGGRRRIYVVGAGLDVAVGTVSAAAAATAAPGVEEEVVEWEVVKGPGEFAGLAPCNAQVLYA

SEQ ID NO: 3237 - protein, 379 aa, Hordeum vulgare subsp. vulgare
MSFSSACKQQVLGAGGEEAREDEAVMELIPGLPEEVAEKCLLHLPFLYHRLFRTVSSNWNRFLTDAPGAAKASTPPAATATVSLSLPFLFAFAFDPVSRRLQCQALDPFSRRWLLLPPVPCGAAAGSFAVVGLPARGEIYVIGGVEEGGDKAVSSVSVYSAATNGWGQVAGMRTPRGYMAAGEVGGRVVVAGEDGEAEVFDPEAGRWAQAAARGGAAVARYDAAAAGGKLYVTEGWAWPFERAPRGAVYEAATDSWSDMARGMREGWTGSCAVSGGRMYIVAEYGEWRLKRYDEARDEWRMVAGGGVPQEVRRPHVVAGQLEEVGGGRRRIYVVGAGLDVAVGTVGAAAEEEERVEWEVVKGPAEFVGLAPCNAQVLYA

SEQ ID NO: 3238 - protein, 384 aa, Oryza sativa Japonica Group
MSFSSSMSKQQVLEVAGDEVGGGGGEEVMELIPGLPEEVAEKCLLHLPFLYHRLFRTVSSTWNRFLTVSPAKFPSAAAASVSLSLPFLFAFAFDPASRRLQCQALDPFSRRWLLLPPVPGGAAAAGSFAVVGLPRRGEIYVIGGVVEGGDKAVRSVAVYSAARNGWEEAAGMGTARGYMAAGEVGGRLVVAGEDGEAEVFDPEEGRWAPAAARRGAAVARYDAAASGGKLYVTEGWAWPFERAPRGAVYDAASDSWSEMARGMREGWTGSCAVAGGRMYIVAEYGEWRLKRYDEPRDEWRMVAGSGVPPEVRRPHVVSGEVEEVGSGGRRRIYVVGAGLDVAIGTVSPSPAIHGGDDERVDWEVVKGPAEFAGLAPCNAQVLYA

SEQ ID NO: 3239 - protein, 377 aa, Zea mays; identical to SEQ ID NO: 1553

SEQ ID NO: 3240 - protein, 313 aa, Zea mays
MRMSCNGCRVLRKGCGDACTIRPCLQWIEAPEAQANATVFLAKFYGRAGLLNLLAAAPDDGVRPAVFRSLLYEACGRIVNPVYGSVGLLWSRQWHRCADAVEAVLRGDPVVQVDAGSDAAAAPPLLAGARPPPPAAFDIRHVPRDPDATAADLLRAGRKRFKRAGSSSNASKAKPLPLELEGKAGNNERASPSPPPTQQREAEELQPVPMVVEPEHGEESAGSHDHHLQLQGWSEEDTDVEAASHVSQAEAEPPASSQSQVLVADQEEEEVGLELTLGFEPVVRQQPRSSRCDKSGLSAASSLIGLRLQLPAA

SEQ ID NO: 3241 - protein, 314 aa, Zea mays
  misc_feature (129)..(129): Xaa can be any naturally occurring amino acid
  misc_feature (195)..(195): Xaa can be any naturally occurring amino acid
  misc_feature (198)..(198): Xaa can be any naturally occurring amino acid
MRMSCNGCRVLRKGCGDACTIRPCLQWIEAPEAQANATVFLAKFYGRAGLLNLLAAAPDDGVRPAVFRSLLYEACGRIVNPVYGSVGLLWSRQWHRCADAVEAVLRGDPVVQVDAGSDAAAAPPLLAGXRPPPPAAFDIRHVPRDPDATAADLLRAGRKRFKRAGSSSNASKAKPLPLELEGKAGNNERASPSPXPTXQLTEAEELQPVPMVVEPEHGEESAGSHDHHLQLQGWSEEDTDVEAASHVSQAEAEPPASSQSQVLVADQEEEEVGLELTLGFEPVVRQQPRSSRCDKSGLSAASSLIGLRLQLPAA

SEQ ID NO: 3242 - protein, 333 aa, Sorghum bicolor
MRMSCNGCRVLRKGCSDACTIRPCLQWIETPDAQANATVFLAKFYGRAGLLNLLAAAPDDAARPAVFRSLLYEACGRIVNPVYGSVGLLWSRQWHKCVDAVDAVLRGHPVVQVDAGSAAAAAPPLLGGGGAGARSAAAPAAAYDIRHVVKDPDAAAAADLLRVARGGRKRFKRAGSSSDASSEGKVKPLKPKAEAGCNERASLSPSPPLKRQEQEAEEMEPVPMVVELEHGEESAGSHDHHHLQLQQGSSEEDTDVEAASHVSQAEAEPPVSSHSQSQVLVAADQEEEEEVGLELTLGFEPVVRQQPRSSCCDRSGLSAASSLIGLRLQLPAA

SEQ ID NO: 3243 - protein, 1198 aa, Zea mays
MLLKFQNMILPDCISCEWVQNSIETWNQKCMNAHDAETIEMLCEELRQSILGNKLKELRDASVQPELVPEWKTWKQELLKQYFSLHPAGNVGNFEKTNCYDDPALDQQGSRKRPKLEVRRGEIQILHMGEADYRTPTEDPNQNKLPSNSVMHENIGALGATSQKNAVMFPGSSGTNENTISGSSNAALQNARLDLDSFKSSRQCSAYIEAKGRQCGRWANDGDIYCCVHQSMHFLDHSSREDKTLTIEAPLCSGMTNMGRKCKHRAQHGSTFCKKHRLQTNLDVMHPGNLLDPSEVLHMGEEPPNKWVEGISKSQALYSIDLETDKNVQAVVQVKLMPTVAIENSGEKGCAMEKTDMCAASTSMTNTDDTSLCIGIRSHDSIVECQDYAKRHTLYCEKHLPKFLKRARNGKSRLVSKDVFVNLLKGCSSRKDKICLHQACEFLYWFLRNNLSHQRTGLASEHMPQILAEVSKNPDFGEFLLKLISTEREKLANIWGFGTDRSKQIYSENKEGSVALQEEKTNLSSGPKCKICGHQFSDDQALGLHWTTVHKKEARWLFRGYSCAACMESFTNKKVLERHVQDVHGAQYLQYSILIRCMSCNSNFLNTDLLYPHIVSDHAQQFRLLDVPQRPSGQSAQQTEGMSGLPLYDSHNVEDENGSQKFVCRLCGLKFDLLPDLGRHHKVAHMVSGAVGHIPLGRGKYQLNRGRHYYSAFKKSLRPTSTLKKSSSSGIDKNLKFQISGLTSQIVESETSSLGKLQDFQCLDVAQTLFSKIQKTRPHPSNFDVLSVARSVCCKTSLLAALEVKYGPLPENIFVKAAKLCSDNGIQIDWHQEGFICPKGCKSRYNSNALLPMQLTAVDFLEAPVDSRNDDEMWGMEEYHYVLDSKHFGWKPKNESVVLCEDISFGREKVPIVCVIDVDAKDSLGMKPEELLPHGSSLPWEGFHYITNRVMDSSLIDSENSMPGCACSHPECSPENCGHVSLFDGVYNSLVDINGTPMHGRFAYDEDSKIILQEGYPIYECNSSCICDSSCQNKVLQKWLLVKLELFRSENKGWAIRAAEPFLQGTFVCEYIGEVVKADKAMKNAESVSSKGGCSYLFSIASQIDRERVRTVGAIEYFIDATRSGNVSRYISHSCSPNLSTRLVLVESKDCQLAHIGLFANQDIAVGEELAYDYRQKLVAGDGCPCHCGTTNCRGRVY

SEQ ID NO: 3244 - protein, 314 aa, Oryza sativa Japonica Group
MEESVGSRGGGGGGLDAQIEQLMECRPLSEPEVKTLCEKAKEILMEESNVQPVKSPVTICGDIHGQFHDLVELFRIGGKCPDTNYLFMGDYVDRGYYSVETVTLLVALKVRYPQRITILRGNHESRQITQVYGFYDECLRKYGSANVWKIFTDLFDYFPLTALVESEIFCLHGGLSPSIDNLDSVRSLDRVQEVPHEGPMCDLLWSDPDDRCGWGISPRGAGYTFGQDISEQFNHTNNLKLVARAHQLVMEGYNWAHEQKVVTIFSAPNYCYRCGNMASILEVDDCRNHTFIQFEPAPRRGEPDVTRRTPDYFL

SEQ ID NO: 3245 - protein, 320 aa, Hordeum vulgare subsp. vulgare
MEKGMDPALLDNIIARLLEVKSLKPGKNAQLSESEIKQLCAASKEIFLAQPNLLELEAPIKICGDVHGQYSDLLRLFEYGGYPPQSNYLFLGDYVDRGKQSLETICLLLAYKVKYPENFFLLRGNHECASVNRIYGFYDECKRRFSVKLWKTFTDCFNCLPVSALIDEKILCMHGGLSPELNKLDQILNLNRPTDVPDTGLLCDLLWSDPSNEAQGWAMNDRGVSYTFGPDKVAEFLEKHDLDLICRAHQVVEDGYEFFADRQLVTIFSAPNYCGEFDNAGAMMSVDETLMCSFQILKPARKMLPGSTNNKSGFKSMRGW

SEQ ID NO: 3246 - protein, 326 aa, Vicia faba
MEQAVLDDIINRLLEVRSRPGKQVQLSEAEIRQLCAAAREIFLHQPNLLELEAPIKICGDIHGQYSDLLRLFEYGGLPPQSNYLFLGDYVDRGKQSLETICLLLAYKIKYPENFFLLRGNHECASINRIYGFYDECKRRFNVRVWKVFTDCFNCLPVAALIDEKILCMHGGLSPDLHNLDQIRNLQRPTDVPDTGLLCDLLWSDPSKEVQGWGMNDRGVSYTFGADKVSEFLQKHDLDLVCRAHQVVEDGYEFFANRQLVTIFSAPNYCGEFDNAGAMMSVDETLMCSFQILKPADKKARLNFGSTTTAKPGNSPAGVKSFLGAKV

SEQ ID NO: 3247 - protein, 322 aa, Oryza sativa Japonica Group
MAAAPGAGGQGGGGMDAVLLDDIIRRLLEVRTARPGKQVQLSESEIRQLCTVSREIFLSQPNLLELEAPIKICGDIHGQYSDLLRLFEYGGFPPEANYLFLGDYVDRGKQSLETICLLLAYKIKYPENFFLLRGNHECASINRIYGFYDECKRRFNVRLWKVFTDCFNCLPVAALIDDKILCMHGGLSPDLTHLDEIKSLPRPTDVPDTGLLCDLLWSDPGKDVQGWGMNDRGVSYTFGADKVSEFLEKHDLDLICRAHQVVEDGYEFFADRQLVTIFSAPNYCGEFDNAGAMMSVDETLMCSFQILKPAERKGKFMASNKM

SEQ ID NO: 3248 - protein, 704 aa, Zea mays
MAGATSSSSVSLILILVASSSPRRSRGRVGIALRSYGYSGAELRLHWARRGSSRDGPAVVRAAAVPAGGEGEDAAAVGKSSSSKAVAVQGSESKAVYSTSPPKTATSAPKQNQSAAKQNGTVGSSSASKSPAPAVSESKAEPSAPVTKTETDASAKVEELKPSVDDAKPVESIGIPEPVDAKVDAAAATDAAASAADDTEDKEHGPLAGPNVMNVVVVASECAPFCKTGGLGDVVGALPKALARRGHRVMVVIPRYGEYAEARDLGVRRRYRVAGQDSEVTYFHSYIDGVDFVFIEAPPFRHRHNDIYGGERSDVLKRIILFCKAAVEVPWYAPCGGTVYGDGNLVFIANDWHTALLPVYLKAYYRDNGLMQYARSVLVIHNIAHQGRGPVDDFVNFDLPEHYIDHFKLYDNIGGEHCNVFAAGLKMADQVVTVSNGYLWELRTSEGGWGLHDIINQNDWKLQGIVNGIDMSEWNPAVDVHLHSDEYTNYTFETLDTGKRQCKAALQRQLGLQVRDDVPLIGFIGRLDHQKGVDIIADAIHWIAGQDVQLVMLGTGRPDLEDMLRRCEAEHSDKVRAWVGFSVPLAHRITAGADVLLMPSRFEPCGLNQLYAMAYGTVPVVHAVGGLRDTVAPFDPFNDTGLGWTFDRAEANRMIDALSHCLNTFRNYKESWRGLEARGMAQDLSWDHAAVLYEDVLVKAKYQW

SEQ ID NO: 3249 - protein, 704 aa, Sorghum bicolor
MSAAISSSSSAFLLLIASSSPRRRRGRVGAALRSYGYSGAELRLHWARRAPSRDAAAVVVRAAAAPAGGEEGEEAAAAGMSSSSKGVAVQGSKAKAVDSTSPPKPVTSATKQSPSAANQNGTVGSSSASKSATPVSELKAETSAPVTKTETDASAKVEEPKPAVDDAKPVESIGVAEPVDAKVDVAAATDVEASAADDSEDKKPGPLAGPNVMNVVVVASECAPFCKTGGLGDVVGALPKALARRGHRVMVVIPRYGEYAEARDLGVRKRYRVAGQDSEVTYFHSYIDGVDFVFIEAPPFRHRHNNIYGGERLDILKRMILFCKAAVEVPWYAPCGGTVYGDGNLVFIANDWHTALLPVYLKAYYRDSGLMQYARSVLVIHNIAHQGRGPVDDFVNFDLPEHYIDHFKLYDNIGGDHSNVFAAGLKAADRVVTVSNGYLWELKTSEGGWGLHGIINQNDWKLQGIVNGIDMSEWNPAVDVHLHSDGYTNYTFETLDTGKRQCKAALQRQLGLQVRDDVPLIGFIGRLDGQKGVDLIGDAIHWIAGQDVQLVMLGTGRPDLEDMLRRCEAEHNDKVRAWVGFSVPLAHRITAGADVLLMPSRFEPCGLNQLYAMAYGTVPVVHAVGGLRDTVAPFDPFNDTGLGWTFDRAEANRMIDALHHCLNTYRNFKESWRGLQERGMAQDLSWDHAAVLYEDVLVKAKYQW

SEQ ID NO: 3250 - protein, 698 aa, Zea mays
MPGAISSSSSAFLLPVASSSPRRRRGSVGAALRSYGYSGAELRLHWARRGPPQDGAASVRAAAAPAGGESEEAAKSSSSSQAGAVQGSTAKAVDSASPPNPLTSAPKQSQSAAMQNGTSGGSSASTAAPVSGPKADHPSAPVTKREIDASAVKPEPAGDDARPVESIGIAEPVDAKADAAPATDAAASAPYDREDNEPGPLAGPNVMNVVVVASECAPFCKTGGLGDVVGALPKALARRGHRVMVVIPRYGEYAEARDLGVRRRYKVAGQDSEVTYFHSYIDGVDFVFVEAPPFRHRHNNIYGGERLDILKRMILFCKAAVEVPWYAPCGGTVYGDGNLVFIANDWHTALLPVYLKAYYRDNGLMQYARSVLVIHNIAHQGRGPVDDFVNFDLPEHYIDHFKLYDNIGGDHSNVFAAGLKTADRVVTVSNGYMWELKTSEGGWGLHDIINQNDWKLQGIVNGIDMSEWNPAVDVHLHSDDYTNYTFETLDTGKRQCKAALQRQLGLQVRDDVPLIGFIGRLDHQKGVDIIADAIHWIAGQDVQLVMLGTGRADLEDMLRRFESEHSDKVRAWVGFSVPLAHRITAGADILLMPSRFEPCGLNQLYAMAYGTVPVVHAVGGLRDTVAPFDPFNDTGLGWTFDRAEANRMIDALSHCLTTYRNYKESWRGLQARGMAQDLSWDHAAVLYEDVLVKAKYQW

SEQ ID NO: 3251 - protein, 698 aa, Zea mays
MPGAISSSSSAFLLPVASSSPRRRRGSVGAALRSYGYSGAELRLHWARRGPPQDGAASVRAAAAPAGGESEEAAKSSSSSQAGAVQGSTAKAVDSASPPNPLTSAPKQSQSAAMQNGTSGGSSASTAAPVSGPKADHPSAPVTKREIDASAVKPEPAGDDARPVESIGIAEPVDAKADAAPATDAAASAPYDREDNEPGPLAGPNVMNVVVVASECAPFCKTGGLGDVVGALPKALARRGHRVMVVIPRYGEYAEARDLGVRRRYKVAGQDSEVTYFHSYIDGVDFVFVEAPPFRHRHNNIYGGERLDILKRMILFCKAAVEVPWYAPCGGTVYGDGNLVFIANDWHTALLPVYLKAYYRDNGLMQYARSVLVIHNIAHQGRGPVDDFVNFDLPEHYIDHFKLYDNIGGDHSNVFAAGLKTADRVVTVSNGYMWELKTSEGGWGLHDIINQNDWKLQGIVNGIDMSEWNPAVDVHLHSDDYTNYTFETLDTGKRQCKAALQRQLGLQVRDDVPLIGFIGRLDHQKGVDIIADAIHWIAGQDVQLVMLGTGRADLEDMLRRFESEHSDKVRAWVGFSVPLAHRITAGADILLMPSRFEPCGLNQLYAMAYGTVPVVHAVGGLRDTVAPFDPFNDTGLGWTFDRAEANRMIDALSHCLTTYRNYKESWRACRARGMAEDLSWDHAAVLYEDVLVKAKYQW

SEQ ID NO: 3252 - protein, 694 aa, Oryza sativa Japonica Group
MSGAIASSPAATLFLAGSSSSSPRRRRSRVSGVWWHLYGGTGLRLHWERRGLVRDGAVVCSASAAGGEDGVAKAKTKSAGSSKAVAVQGSTAKADHVEDSVSSPKYVKPAVAKQNGEVVSRATKSDAPVSKPKVDPSVPASKAEADGNAQAVESKAALDKKEDVGVAEPLEAKADAGGDAGAVSSADDSENKESGPLAGPNVMNVIVVASECSPFCKTGGLGDVVGALPKALARRGHRVMVVIPRYGEYAEAKDLGVRKRYRVAGQDSEVSYFHAFIDGVDFVFLEAPPFRHRHNDIYGGERFDVLKRMILFCKAAVEVPWFAPCGGSIYGDGNLVFIANDWHTALLPVYLKAYYRDNGLMQYTRSVLVIHNIAHQGRGPVDDFATMDLPEHYIDHFRLYDPVGGEHSNVFAAGLKMADRAVTVSHGYLWEIKTMDGGWGLHEIINHNDWKLQGIVNGIDMAEWNPEVDEHLQSDGYANYTFETLDTGKKQCKEALQRQLGLQVRDDVPLIGFIGRLDHQKGVDIIGDAMPWIAGQDVQVVMLGTGRPDLEEMLRRFESEHNDKVRGWVGFSVQLAHRITAGADVLLMPSRFEPCGLNQLYAMAYGTVPVVHAVGGLRDTVAPFDPFADTGLGWTFDRAEANRMIDALGHCLNTYRNYKESWRGLQARGMAQDLSWDHAAELYEDVLVKAKYQW

SEQ ID NO: 3253 - protein, 694 aa, Oryza sativa Indica Group
MSGAIASSPAATLFLAGSSSSSPRRRRSRVSGVWWHLYGGTGLRLHWERRGLVRDGAVVCSASAAGGEDGVAKAKAKSAGSSKAVAMQGSTAKADHVEDSVSSPKSVKPAVAKQNGEVVSRATKSDAPVPKPKVDPSVPASKAEADGNAQAVESKAALDKKEDVGVAEPLEAKADAGGDAGAVSSADDSENKESGPLAGPNVMNVIVVASECSPFCKTGGLGDVVGALPKALARRGHRVMVVIPRYGEYAEAKDLGVRKRYRVAGQDSEVSYFHAFIDGVDFVFLEAPPFRHRHNDIYGGERFDVLKRMILFCKAAVEVPWFAPCGGSIYGDGNLVFIANDWHTALLPVYLKAYYRDNGLMQYTRSVLVIHNIAHQGRGPVDDFATMDLPEHYIDHFRLYDPVGGEHSNVFAAGLKMADRAVTVSHGYLWEIKTMDGGWGLHEIINHNDWKLQGIVNGIDMAEWNPEVDEHLQSDGYANYTFETLDTGKKQCKEALQRQLGLQVRDDVPLIGFIGRLDHQKGVDIIGDAMPWIAGQDVQVVMLGTGRPDLEEMLRRFESEHNDKVRGWVGFSVQLAHRITAGADVLLMPSRFEPCGLNQLYAMAYGTVPVVHAVGGLRDTVAPFDPFADTGLGWTFDRAEANRMIDALGHCLNTYRNYKESWRGLQARGMAQDLSWDHAAELYEDVLVKAKYQW

SEQ ID NO: 3254 - protein, 677 aa, Oryza sativa Japonica Group
FTSSSPRRRRSRVSGVWWHLYGGTGLRLHWERRGLVRDGAVVCSASAAGGEDGVAKAKTKSAGSSKAVAVQGSTAKADHVEDSVSSPKYVKPAVAKQNGEVVSRATKSDAPVSKPKVDPSVPASKAEADGNAQAVESKAALDKKEDVGVAEPLEAKADAGGDAGAVSSADDSENKESGPLAGPNVMNVIVVASECSPFCKTGGLGDVVGALPKALARRGHRVMVVIPRYGEYAEAKDLGVRKRYRVAGQDSEVSYFHAFIDGVDFVFLEAPPFRHRHNDIYGGERFDVLKRMILFCKAAVEVPWFAPCGGSIYGDGNLVFIANDWHTALLPVYLKAYYRDNGLMQYTRSVLVIHNIAHQGRGPVDDFATMDLPEHYIDHFRLYDPVGGEHSNVFAAGLKMADRAVTVSHGYLWEIKTMDGGWGLHEIINHNDWKLQGIVNGIDMAEWNPEVDEHLQSDGYANYTFETLDTGKKQCKEALQRQLGLQVRDDVPLIGFIGRLDHQKGVDIIGDAMPWIAGQDVQVVMLGTGRPDLEEMLRRFESEHNDKVRGWVGFSVQLAHRITAGADVLLMPSRFEPCGLNQLYAMAYGTVPVVHAVGGLRDTVAPFDPFADTGLGWTFDRAEANRMIDALGHCLNTYRNYKESWRGLQARGMAQDLSWDHAAELYEDVLVKAKYQW

SEQ ID NO: 3255 - protein, 694 aa, Oryza sativa Indica Group
MSGAIASSPAATLFLAGSSSSSPRRRRSRVSGVWWHLYGGTGLRLHWERRGLVRDGAVVCSASAAGGEDGVAKAKAKSAGSSKAVAMQGSTAKADHVEDSVSSPKSVKPAVAKQNGEVVSRATKSDAPVPKPKVDPSVPASKAEADGNAQAVESKAALDKKEDVGVAEPLEAKADAGGDAGAVSSADDSENKESGPLAGPNVMNVIVVASECSPFCKTGGLGDVVGALPKALARRGHRVMVVIPRYGEYAEAKDLGVRKRYRVAGQDSEVSYFHAFIDGVDFVFLEAPPFRHRHNDIYGGERFDVLKRMILFCKAAVEVPWFAPCGGSIYGDGNLVFIANDWHTALLPVYLKAYYRDNGLMQYTRSVLVIHNIAHQGRGPVDDFATMDLPEHYIDHFRLYDPVGGEHSNVFAAGLKMADRAVTVSHGYLWEIKTMDGGWGLHETINHNDWKLQGIVNGIDMAEWNPEVDEHLQSDGYANYTFETLDTGKKQCKEALQRQLGLQVRDDVPLIGFIGRLDHQKGVDIIGDAMPWIAGQDVQVVMLGTGRPDLEEMLRRFESEHNDKVRGWVGFSVQLAHRITAGADVLLMPSRFEPCGLNQLYAMAYGTVPVVHAVGGLRDTVAPFDPFADTGLGWTFDRAEANRMIDALGHCLNTYRNYKESWRGLQARGMAQDLSWDHAAELYEDVLVKAKYQW

SEQ ID NO: 3256 - protein, 694 aa, Oryza sativa
MSGAIASSPAATLFLAGSSSSSPRRRRSRVSGVWWHLYGGTGLRLHWERRGLVRDGAVVCSASAAGGEDGVAKAKTKSAGSSKAVAVQGSTAKADHVEDSVSSPKYVKPAVAKQNGEVVSRATKSDAPVSKPKVDPSVPASKAEADGNAQAVESKAALDKKEDVGVAEPLEAKADAGGDAGAVSSADDSENKESGPLAGPNVMNVIVVASECSPFCKTGGLGDVVGALPKALARRGHRVMVVIPRYGEYAEAKDLGVRKRYRVAGQDSEVSYFHAFIDGVDFVFLEAPPFRHRHNDIYGGERFDVLKRMILFCKAAVEVPWFAPCGGSIYGDGNLVFIANDWHTALLPVCLKAYYRDNGLMQYTRSVLVIHNIAHQGRGPVDDFATMDLPEHYIDHFRLYDPVGGEHSNVFAAGLKMADRAVTVSHGYLWEIKTMDGGWGLHEIINHNDWKLQGIVNGIDMAEWNPEVDEHLQSDGYANYTFETLDTGKKQCKEALQRQLGLQVRDDVPLIGFIGRLDHQKGVDIIGDAMPWIAGQDVQVVMLGTGRPDLEEMLRRFESEHNDKVRGWVGFSVQLAHRITAGADVLLMPSRFEPCGLNQLYAMAYSTVPVVHAVGGLRDTVAPFDPFADTGLGWTFDRAEANRMIDALGHCLNTYRNYKESWRGLQARGMAQDLSWDHAAELYEDVLVKAKYQW

SEQ ID NO: 3257 - protein, 704 aa, Sorghum bicolor
MSAAISSSSSAFLLLIASSSPRRRRGRVGAALRSYGYSGAELRLHWARRAPSRDAAAVVVRAAAAPAGGEEGEEAAAAGMSSSSKGVAVQGSKAKAVDSTSPPKPVTSATKQSPSAANQNGTVGSSSASKSATPVSELKAETSAPVTKTETDASAKVEEPKPAVDDAKPVESIGVAEPVDAKVDVAAATDVEASAADDSEDKKPGPLAGPNVMNVVVVASECAPFCKTGGLGDVVGALPKALARRGHRVMVVIPRYGEYAEARDLGVRKRYRVAGQDSEVTYFHSYIDGVDFVFIEAPPFRHRHNNIYGGERLDILKRMILFCKAAVEVPWYAPCGGTVYGDGNLVFIANDWHTALLPVYLKAYYRDNGLMQYARSVLVIHNIAHQGRGPVDDFVNFDLPEHYIDHFKLYDNIGGDHSNVFAAGLKAADRVVTVSNGYLWELKTSEGGWGLHDIINQNDWKLQGIVNGIDMSEWNPAVDVHLHSDGYTNYTFETLDTGKRQCKAALQRQLGLQVRDDVPLIGFIGRLDGQKGVDLIGDAIHWIAGQDVQLVMLGTGRPDLEDMLRRCEAEHNDKVRAWVGFSVPLAHRITAGADVLLMPSRFEPCGLNQLYAMAYGTVPVVHAVGGLRDTVAPFDPFNDTGLGWTFDRAEANRMIDALHHCLNTYRNFKESWRGLQERGMAQDLSWDHAAVLYEDVLVKAKYQW

SEQ ID NO: 3258 - protein, 419 aa, Hordeum vulgare subsp. vulgare
GHASHPHSVALGFLRLFLSLSPVPLVPIESESMESSRSRKRTRQELDGAGDPPPEREVVARGGASPPWRDDDRDGHYVFDLGENLTRRYKILSKMGEGTFGRVLECWDRETREYVAIKVVRSIRKYRDAAMIEIDVLNRLAENERYRSLCVQIQRWFDYRNHICIVFEKLGPSLYDFLKRNRYQPFPVELVREFGRQLLESVAYMHELRLIHTDLKPENILLVSSEYIKVPSSKNSQDEIHCKCLPKSSAIKLIDFGSTAFDNQEHNSIVSTRHYRAPEIILGLGWSLPCDIWSVGCILVELCSGEALFQTHENLEHLAMMERVLGPIPEHMIRKASSSAQKYFRRGARLNWPEGAVTRESIRAVRKLHRLKDLVARNADYSKASLADLLYGLLKFEPSERLTAQEALDHPFFRIPGPT

SEQ ID NO: 3259 - protein, 388 aa, Oryza sativa Japonica Group
MESSRSRKRARQDWDGAGAPPPPAERAVVARGGASPPWRDDDRDGHYVFDLGENLNRRYKILSKMGEGTFGRVLECWDRETHEYVAIKVVRSIRKYRDAAMIEIDVLNRLAENERYRSLCVQIQGWFDYRNHICIVFEKLGPSLYDFLKRNRYQPFPVELVREFGRQLLESVAYMHELRLIHTDLKPENILLVSSEYIRVPGSKKNSQDEMHFKCLPKSSAIKLIDFGSTAFDNQEHSSIVSTRHYRAPEIILGLGWSFPCDLWSVGCIIVELCSGEALFQTHENLEHLAMMERVLGPLPEHMIRKASSSAQKYFRRGARLNWPEGAVSRESIRAVKKLDRLKDLVARKADHSRAVLADLLYGLLKFEPSERLTAQEALDHPFFRNTT

SEQ ID NO: 3260 - protein, 386 aa, Zea mays
MESSRSRKRTRQAHDCAAAPPPEREVVARGGASPPWREDDRDGHFVFDLGENLTRRYKILSKMGEGTFGRVLECWDRETHEYVAIKVVRSIRKYRDAAMIEIDVLNRLAENEKYRSLCVQIQRWFDYRNHICIVFEKLGPSLYDFLKRNRYQPFPVELVREFGRQLLESVAYMHELRLIHTDLKPENILLVSSEYIKVPSTKKNSQGEMHFKCLPKSSAIKLIDFGSTAFDNRDHNSIVSTRHYRAPEIILGLGWSFPCDIWSVGCILVELCSGEALFQTHENLEHLAMMERVLGPLPEDMIRKASSSAQKYFRRATRLNWPEGAVSRESIRAVRKLDRLKDLVSRNADHSKVALVDLLYGLLRFEPSERLTAEEALDHPFFRNPT

SEQ ID NO: 3261 - protein, 386 aa, Zea mays
MESSRSRKRTRQAHDCAAAPPPEREVVARGGASPPWREDDRDGHFVFDLGENLTRRYKILSKMGEGTFGRVLECWDRETHEYVAIKVVRSIRKYRDAAMIEIDVLNRLAENEKYRSLCVQIQRWFDYRNHICIVFEKLGPSLYDFLKRNRYQPFPVELVREFGRQLLESVAYMHELRLIHTDLKPENILLVSSEYIKVPSTKKNSQGEMHFKCLPKSSAIKLIDFGSTAFDNRNHNSIVSTRHYRAPEIILGLGWSFPCDIWSVGCILVELCSGEALFQTHENLEHLAMMERVLGPLPEDMIRKASSSAQKYFRRATRLNWPEGAVSRESIRAVRKLDRLKDLVSRNADHSKVALVDLLYGLLRFEPSERLTAEEALDHPFFRNPT

SEQ ID NO: 3262 - protein, 386 aa, Zea mays
MESSQSRKRTRQAYDCAAALPPEREVVARGGASPPWREDDRDGHYVFDLGENLTRRYKILSKMGEGTFGRVLECWDRETREYVAIKVVRSIRKYRDAAMIEIDVLNRLAENEKYRSLCVQIQRWFDYRNHICIVFEKLGPSLYDFLKRNRYRPFPVELVREFGRQLLESVAYMHDLRLIHTDLKPENILLVSSEYIKVPSTKKNSQDEMHFKCLPQSSAIKLIDFGSTAFDNQDHNSIVSTRHYRAPEIILGLGWSFPCDIWSVGCILVELCSGEALFQTHENLEHLAMMERVLGPLPEHMIRKSSSSAQKYFRRATRLNWPEGAVSRESIRAVKKLDRLKDLVSRNAGHSKAELADLLYSILRFEPSERLTAQEALEHPFFRNPT

SEQ ID NO: 3263 - protein, 410 aa, Oryza sativa Japonica Group
GFLSLSLSPLSLSPLSPIESESMESSRSRKRARQDWDGAGAPPPPAERAVVARGGASPPWRDDDRDGHYVFDLGENLNRRYKILSKMGEGTFGRVLECWDRETHEYVAIKVVRSIRKYRDAAMIEIDVLNRLAENERYRSLCVQIQGWFDYRNHICIVFEKLGPSLYDFLKRNRYQPFPVELVREFGRQLLESVAYMHELRLIHTDLKPENILLVSSEYIRVPGSKKNSQDEMHFKCLPKSSAIKLIDFGSTAFDNQEHSSIVSTRHYRAPEIILGLGWSFPCDLWSVGCIIVELCSGEALFQTHENLEHLAMMERVLGPLPEHMIRKASSSAQKYFRRGARLNWPEGAVSRESIRAVKKLDRLKDLVARKADHSRAVLADLLYGLLKFEPSERLTAQEALDHPFFRNTT

SEQ ID NO: 3264 - protein, 354 aa, Hordeum vulgare subsp. vulgare
RFGFPSLWFLLCFSFVFPIILMYSDTSWIFIGTFGRVLECWDRETREYVAIKVVRSIRKYRDAAMIEIDVLNRLAENERYRSLCVQIQRWFDYRNHICIVFEKLGPSLYDFLKRNRYQPFPVELVREFGRQLLESVAYMHELRLIHTDLKPENILLVSSEYIKVPSSKKNSQDEIHCKCLPKSSAIKLIDFGSTAFDNQEHNSIVSTRHYRAPEIILGLGWSLPCDIWSVGCILVELCSGEALFQTHENLEHLAMMERVLGPIPEHMIRKASSSAQKYFRRGARLNWPEGAVTRESIRAVRKLHRLKDLVARNADYSKASLADLLYGLLKFEPSERLTAQEALDHPFFRIPGPT

SEQ ID NO: 3265 - protein, 331 aa, Sorghum bicolor
MKRTASWIFVGTFGRVLECWDRETREYVAIKVVRSIRKYRDAAMIEIDVLNRLAENEKYSSLCVQIQRWFDYRNHICIVFEKLGPSLYDFLKRNRYQPFPVELVREFGRQLLQSVAYMHELRLIHTDLKPENILLVSSEYIKVPSTKKNTQDEMHFKCLPKSSAIKLIDFGSTAFDNQDHNSIVSTRHYRAPEIILGLGWSFPCDIWSVGCILVELCSGEALFQTHENLEHLAMMERVLGPLPEHMTRKASSSAQKYFRRATRLNWPEGAVSRESIRAVRKLDRLKDLVSRNADHSKAALVDLLYSLLRFEPSERLTAQEALDHPFFRNPT

SEQ ID NO: 3266 - protein, 404 aa, Populus trichocarpa
MVAAVVDIERMEKQQRVRKRPRFAWDVGPAQPEERAPVVARNEGMAARYVSPPRREDDREGHYMFNLGENLTPRYKILSKMGEGTFGRVLECWDRQTREYVAIKVVRSIHKYRDAAMIEVDILQRVAKNEKASSRCVQIRNWFDYRNHICIVFEKLGPSLFDFLKRNKYSPFPVDLVREFGRQLLESVAYMHDLRLIHTDLKPENILLVSSEYIKLPGSKRSSSDEMHFRCLPKSSSIKLIDFGSTAFDNQNHSSIVSTRHYRAPEVILGLGWSYPCDLWSIGCILVELCSGEALFQTHENLEHLAMMERVLGPLPEHMILRANRGAEKYFRRGSRLNWPEGAVSRESIRAVKKLDRLKLMISQHVDSSRSSLIDLLHGLLKYDPSERLTAWQALNHPFFKCPT

SEQ ID NO: 3267 - protein, 906 aa, Sorghum bicolor
MGTRMPILPRLSSTLSTALLEWILMLLLFIDAVYSFLVTRFARLCRLPAPCPFCSRLDHVLGNEKPCFYRELICKTHKTEISSLAFCSLHQKLAGAQNMCEGCCGKVTHDDKTDETVMDANVLYSKQRIDDALNSPREKVCSCCGQHFKQRTVALSSRKTAELEPTGAFGSPEIYTEYSVVCQVDEPLEPKDIYHQTDYRSNERDDLLQMTSDSEIEVPCANDVKSSQSREASVVDEDLQEDAACEQPVLPSPVVIKESEIIVKKEPSVEDTCNTSLACPAVDDHPNSGGDVDRTEEKESLSRKLASRHDPVLVIENSGLEDAGISQIPVMPSDELPQVPGEIEPSQSTSEGNADPYTSQFTILEEHYAVSEEGNIKGILEQVDVPEITGRSSGEFHQRIASAADPHTNELVLENAHHGASEDANQKDNCGDIHVSQVSAGSKTCGEVNKIEPTGDMGAHKLIVQDPSGSAPKDLIDKDYVDEPHISATTVRSSGEIPQDHSATEEYPKTSDSVVERRPSLSTQISMNEAYRLAIGNKGSLPSPTLTDVILGKDSTSSINEELRLLLSQLSASRGLEAPWVDPGPSPRAYGRGDELVVQNITNRISLERNASGLESLDGSIVSEMEGESTIDRLRRQIDLDRKSIHLLCRELEEERNASAIAASQALAMITKLQDEKAAMQMEASHYQRMMEEQAEYDSEALAKTNELLAEREQQIEELEIELENYRRQYGGGAIEERGNQAAFKQENRDTAMLDVGDLEDPLKQGINSLVSLEEERAYIASGLRKLEQKLQFYSNNSVSVDLPSPDVKDDLSDKVYVIEDFSLDRQESSIESKEAGSLTTSGKIDLDAVQEEISKLNRRLKTLEGDRSFLEHSINSLRNGDEGLMFIQEIACNLRELRAIAIDKK

SEQ ID NO: 3268 - protein, 980 aa, Zea mays
MGTRMPIFPRLSSALSTALLEWILMLLLFIDAVYSFLVTRFARLCRLPAPCPFCSRLDHFLGNEKPCFYRDLICKTHKSEISSLAFCSLHQKLAGARNMCEGCCGEVAGDDKTDETDSNQRIGDAFNSPREKVCSCCGQHFKRRSVALSSRETAELEPTRAFGSPKTYTEYSVVCQVDEPLEPKDIYHQSDYRSNEPDGLLQMTSDSETEVPCAIDVRSSQSREADVKGEDLQEDPACEQPVLPSPVVIKKSEIVVRKEPSVEDTCITSSACPAVDDHPNSGGGVDQMEEKESLSRKWAPQHDPVLVIENSGLQDAGISQIMPSDELPQVSGETEPSQSTNEGNTDPYKSQFTILEEHYAVSEEGNIKCILEQFDVTEITSRSGGEFRQRSASAADSHTNALVLENTHHGASEDAEQKDNCGDIRVSQVGAGSKTSGEVEDYTKKIEPTGDMGEHELVVQDPSGSAPKDLIVKDYVDEPHVSTTTMRSSGEVPQDHSATEENPKTIDSIVERRPSLSSQISITLRSSGEVLQDHSATEENPKTSESIVERRPSLSSQISITLRSSGEVLQDHSATEENSKTSESIVERRPSLSSQISMNEAYRLAIGNKGSLTSPTLTDVILGKDSTSSINEELRLLLSQISASRGLEAPWADPGPSPRAYGRGDELVVQNITNRLSLERNASGLESLDGSIVSEMEGESTIDRLRRQIDLDRKSIHLLCRELEEERNASAIAASQALAMITKLQDEKAAMQMEASHYQRMMEEQAEYDSEAVAKANELLTEREQLIEELEVELENYRRQYGGGSTQRRGNRVAFKQENRDTTMLDGGGLEDPLINTQQGINSLVGLEEERAYIATGLRKLEQKLQFYSNNSVSVELPSPDVKDDLSDKVYVTEDFSLHCQESSMESKEAGSSTTSGEVDLVAVQEEIAKLNRRLKTLEGDRSFLEHSINSLRNGDEGLMFIQEIACNLRELRAIAIGKK

SEQ ID NO: 3269 - protein, 388 aa, Oryza sativa Indica Group
MESSRSRKRARQDWDGAGAPPPPAERAVVARGGASPPWRDDDRDGHYVFDLGENLNRRYKILSKMGEGTFGRVLECWDRETHEYVAIKVVRSIRKYRDAAMIEIDVLNRLAENERYRSLCVQIQGWFDYRNHICIVFEKLGPSLYDFLKRNRYQPFPVELVREFGRQLLESVAYMHELRLIHTDLKPENILLVSSEYIRVPGSKKNSQDEMHFKCLPKSSAIKLIDFGSTAFDNQEHSSIVSTRHYRAPEIILGLGWSFPCDLWSVGCILVELCSGEALFQTHENLEHLAMMERVLGPLPEHMIRKASSSAQKYFRRGARLNWPEGAVSRESIRAVKKLDRLKDLVARKADHSRAVLADLLYGLLKFEPSERLTAQEALDHPFFRNTT

SEQ ID NO: 3270 - protein, 351 aa, Hordeum vulgare subsp. vulgare
MAGAAWPLSAASALLPAPLSLTLLLGSLVVVLALGVAAVFLEHIRKIGCMHSIERSAVSDAFFEDPGSLKKVPCPSIFDPAEKYISLIVPAYNEECRLPEALTETLNYLKQRSSADKSFTYEVLIVDDGSTDRTSKVAFEYVKKHNIDNVRVLLLGRNHGKGEAVRKGMLHSRGELLLMLDADGATKVTDLAKLEAEVRALAGKAKSSLAPSASSPQRLSDVEIAVFGSRAHLEKQALATRKWYRNFLMKGFHLVVLLTAGPGIRDTQCGFKMFTRSAARKLFTNIRLKRWCFDVEIVYLCKHLRIPMAEVSVSWTEIPGSKVRMTSILHMVFELLLIRVGYGLGIWKIYS

SEQ ID NO: 3271 - protein, 350 aa, Zea mays
MAAAWPLSAIAGILPASLSLTLLLATLVSILVLGAAAFFFEHIRKIGCMHSLERSAVSDAFFEDPNSLKKVPCPSVLDPPEKYISLIVPAYNEEYRLPEALTETLNYLKRRSTADKSFSYEVLIVDDGSTDGTSKVAFSFVKKHKIDNVRVLLLGRNHGKGEAVRKGMLHSRGELLLMLDADGATKVTDLEKLEAQVHALAKKAKSSPGTSTSSSQNLSDVEVAVFGSRAHLEKQALATRKWYRNFLMKGFHLVVLLTAGPGIKDTQCGFKMFTRAAARKLFTNIRLKRWCFDVELVYLCKRLRIPMVEVSVNWTEIPGSKVRMTSIMHMVFELLLIKVGYGLGIWKIGS

SEQ ID NO: 3272 - protein, 352 aa, Oryza sativa Japonica Group
MAAAGWPLSSSVADLLPASLSLTLLLASLVVVVVLAAAAFFFEHIRKIGCTHSLERTEVSAAFFEDPNSLNKVRCPSIYDPAEKYISLIIPAYNEEHRLPEALTETLNYLKQRSAVEKSFTYEVLIVDDGSTDHTSKVAFEFVRKHKIDNVRVLLLGRNHGKGEAVRKGMLHSRGELLLMLDADGATKVTDLEKLEAQVRALAKKAESSLAPSSSPSQRLSDAEIAVFGSRAHLEKQALATRKWYRNFLMKGFHLVVLLTAGPGIRDTQCGFKMFTRAAARKLFTNIRLKRWCFDVELVYLCKHLRIPMAEVSVNWTEIPGSKVRMTSILHMVFELLLIKVGYGLSIWKIYS

SEQ ID NO: 3273 - protein, 380 aa, Oryza sativa Japonica Group
MAAAGWPLSSSVADLLPASLSLTLLLASLVHPLPPSAPFLLRLLALLIPSPRPSRAQVVVVVLAAAAFFFEHIRKIGCTHSLERTEVSAAFFEDPNSLNKVRCPSIYDPAEKYISLIIPAYNEEHRLPEALTETLNYLKQRSAVEKSFTYEVLIVDDGSTDHTSKVAFEFVRKHKIDNVRVLLLGRNHGKGEAVRKGMLHSRGELLLMLDADGATKVTDLEKLEAQVRALAKKAESSLAPSSSPSQRLSDAEIAVFGSRAHLEKQALATRKWYRNFLMKGFHLVVLLTAGPGIRDTQCGFKMFTRAAARKLFTNIRLKRWCFDVELVYLCKHLRIPMAEVSVNWTEIPGSKVRMTSILHMVFELLLIKVGYGLSIWKIYS

SEQ ID NO: 3274 - protein, 507 aa, Zea mays
MAAQNAGIIIDCRQAMSPDPPAVELEVIGSSSPSITPCPAAAAPADADFDHDGCTAELSSSTDRELQDHIRQWEGSYGQGVLRRMPDGGEKMHSRVLRMKKELERRRARQRMDVTPLRQTVQAKRTGGSSGEIYNLKSDDETMDSTASKHYPNSSCTTSTKTYTQVKGAAYEEQSSLSHGKYAYPKNGGQISKESLRHQSKTWNLAKNKASPLEIKKDVVLLDDDDDIEPARSADVQISNKWEESNIHYPSSTDPEAVELTYSDMKCLEPEEYLKSPVINFYLQYLKKARPRRDLHMFNTYFYSKLEEALSMPGHHDSEFSKLRRWWRGVDIFKKAYIILPINESMHWSLIIVCMPTKEADSGPIILHLDSLGLHSSQKLFDIVARYIQAERWHLGMDSSYDIPFSGRIWRRLSKNINREKIEVPRQRNEYDCGLFMLYYIDRFIQDAPERLTKEGLGMFGRRWFNHEEASAFRGGIRALLIDLFHSALDDDGPSEAELEDKDIQMD

SEQ ID NO: 3275 - protein, 558 aa, Zea mays
MAAQNAGTIIDCRQAMSPDPPAVELEVIGSSSPSIRPCPAAAALADADIDHDGCTAEFSSSTDRELQDRIREWEGPSLQGVLRRMPDGGKKMQSLVLRMKKELERRRARQRMDVTPLRQTVQAKRTGGSSGEIYNLKSDDETMDSTASKHYPNSSCTTSTKTYTQVKGAAYEEQSSLSHGKYAYPKNGGQISKESLRHQSKTCAYLPKSTCSEHLNMDIDRRKTPTLKSRNINQQENSTIDKCTNATFGSNRRWNLAKNKASPLEIKKDVVLLDDDDDIEPARSADVQISNKWEESNIHYPSSTDPEAVELTYSDMKCLEPEEYLKSPVINFYLQYLKKARPRRDLHMFNTYFYSKLEEALSMPGHHDSEFSKLRRWWRGVDIFKKAYIILPINESMHWSLIIVCMPTKEADSGPIILHLDSLGLHSSQKLFDIVARYIQAERWHLGMDSSYDIPFSGRIWRRLSKNINREKIEVPRQGNEYDCGLFMLYYIDRFIQDAPERLTKEGLGMFGRRWFNHEEASAFRGGIRALLIDLFHSALDDDGPSEAELEDKDIQMD

SEQ ID NO: 3276 - protein, 537 aa, Sorghum bicolor
MSASSGGIVIDRRQAMPPDSPAVELEVVGSPSPSVAPCPAAAAGADADIDHGGGAAEFEQVSDKKLQERISRCEGMLKQGIPQRTPDGGEKMQACVLRMKKELERRRARQWKDDTVLRQAVQAKCTGGSRGEIYDLKSDDETMDSTGSKFYPNSSFTPATKTCTQVKGAAYKEESSLSHAKCAYPKNGGQISQESLNPQLKTCAHLPKSCTINQQENSTVHKRINATFGSNRRSKLAKNKPLPSLKIKKDVVLLDDDDDTEPARSADVQISNKLDESTIHYPSSTDPEAVELSYSDMKCLEPEEYLKSPVINFCLQYLKKSRPRRDLYMFNTYFYSILEEALSTPGDHDSKFSKLRRWWRSVDIFKKAYIILPINELMHWSLIIVCMPTKESDSGPIMLHLDSLGMHSSQKLFDIVQRCIEAEWRHLQKDSSYDIPFSGRIWKHLSRNIYGEKVEVPRQHNDYDCGLFMLYYIDRFILEAPERLTKEGLGMFGRRWFDHKKASALRERIRQLLFDLFDIAPDEDGPSEPELHPGEDK

SEQ ID NO: 3277 - protein, 422 aa, Zea mays
MEGSPVTRLPEANSLPDGFVPDSESPGTDATFPFSAPIVDDALNSDIPAATNPGGEETLNDPPLPASSAEDASSAAAAEALGTLSLDAAAEPERALEENGPTGAARGEASLKNCASELVGAPTAQKGSVEPKRKVVKRSKLEKDRELFELAQQYHKVVAERDAAIGVKEKLESLCREFQRQNKMLKEECQRVSTEGQNMRMELSEKFDIAIKGVSVKLEEQRVECIAQLEENNMLRSKLKDIADQYNITQQKYAHQLKEKMMELELADLRLQQHQEKAAHEHTQMQLYAEQVSQLMTTEKNLRLQLASDGERFQHFQDALSKSNEVFETYKQEMEKMILVIKNLKKDNEFLKGKCENSDIALVKLIEERELTKKQIEKLKNQKETLESLCRSLQAERKQGRSASIPDAPSSQEDMPATSQES

SEQ ID NO: 3278 - protein, 422 aa, Zea mays
MEGSLVTRLPEANSLPDGFVPDSESPGTDATFPFSAPIVDDALNSDIPAATNPGGEETLNDPPLPASSAEDASSAAAAEALGTLSLDAAAEPERALEENGPTGAARGEASLKNCASELVGAPTAQKGSVEPKRKVVKRSKLEKDRELFELAQQYHKVVAERDAAIGVKEKLESLCREFQRQNKMLKEECQRVSTEGQNMRMELSEKFDIAIKGVSVKLEEQRVECIAQLEENNMLRSKLKDIADQYNITQQKYAHQLKEKMMELELADLRLQQHQEKAAHEHTQMQLYAEQVSQLMTTEKNLRLQLASDGERFQHFQDALSKSNEVFETYKQEMEKMILVIKNLKKDNEFLKGKCENSDIALVKLIEERELTKKQIEKLKNQKETLESLCRSLQAERKQGRSASIPDAPSSQEDMPATSQES

SEQ ID NO: 3279 - protein, 426 aa, Sorghum bicolor
MEGSPVTRLPEANTLPDGFVPDVESSGTDAASPSSAPIAADALDSDIPAATNPGGEETLSDLSLPASAAEDASSAAAAEALGTLSLAAAAEPERALGEHGPTGAARGEETLKENCASEQVGAPTAQKVVKGSGEPKRKVGKRSKLERDRELFELAQQYHKVVAERDAAILVKEKLESLCREFQRQNKTLKEECQRVSTEGQNMRMALSEKFDNAIKGVSAKLEEQRVLSIAQLEENNMLRSKLNDLADQYSITQQKYAHQLKEKTLELELADLRLQQNQEKAAQEHTQMQLYAEQVAQLMTTEKNLRLQLASDGDRFQHFQDALSKSNEVFETYKQEMEKMISVIKNLKKENEFLKGKCENSDFALVKLIEERELTKKQLEKLKNQKEKLESLCRSLQAERKQGPSASIPDAPSSQEDVSATSQES

SEQ ID NO: 3280 - protein, 422 aa, Zea mays
MEGSPVARLPEANSLPDGFVPDSESSDTDAAPPSSAPIVDDAIDSDSPDATNPGGEETLSDPSLPASTAEDASSAAAAEALDTLCLDVVADPERALGEHGPTTAARGEGSLKENRASEQVGAPSDQKGSGEPKRKVIKHSKLEKDKELFQLAQQYHKVVAERDQAIAVKDRLESLCREFQRQNKMLKEECQRVSTEGQNMRTELSEKFDHAIKGVSAKLEEQRVERISQLEENNTLRSKLKDLADQYNITQQKYAHQLKEKMLELELADLRLQQHQEKAAQEHTQMQLYAEQVSQLMTTEKNLRLQLASDGERFQHFQDALSKSNEVFETYKQEMEKMISVIKNLKKENEFLKGECENSDIAIVKLIEERELTKKQIEKLKNQREKLESLCRTLQAERKQGPSASIPDAPSSQEVSATSQES

SEQ ID NO: 3281 - protein, 425 aa, Zea mays
MEGSPVARLPEANSLPDGFVPDSESSDTDAAPPSSAPIVDDAIDSDSPDATNPGGEETLSDPSLPASTAEDASSAAAAEALDTLCLDVVADPERALGEHGPTTAARGEGSLKENRASEQVGAPSDQKVVKGSGEPKRKVIKHSKLEKDKELFQLAQQYHKVVAERDQAIAVKDRLESLCREFQRQNKMLKEECQRVSTEGQNMRTELSEKFDHAIKGVSAKLEEQRVERISQLEENNTLRSKLKDLADQYNITQQKYAHQLKEKMLELELADLRLQQHQEKAAQEHTQMQLYAEQVSQLMTTEKNLRLQLASDGERFQHFQDALSKSNEVFETYKQEMEKMISVIKNLKKENEFLKGKCENSDIAIVKLIEERELTKKQIEKLKNQREKLESLCRTLQAERKQGPSASIPDAPSSQEVSATSQES

SEQ ID NO: 3282 - protein, 425 aa, Zea mays
MEGSPVARLPEANSLPDGFVPDSESSDTDAAPPSSAPIVDDAIDSDSPDATNPGGEETLSDPSLPASTAEDASSAAAAEALDTLCLDVVADPERALGEHGPTTAARGEGSLKENRASEQVGAPSDQKVVKGSGEQKRKVIKHSKLEKDKELFQLAQQYHKVVAERDQAIAVKDRLESLCREFQRQNKMLKEECQRVSTEGQNMRTELSEKFDHAIKGVSAKLEEQRVERISQLEENNTLRSKLKDLADQYNITQQKYAHQLKEKMLELELADLRLQQHQEKAAQEHTQMQLYAEQVSQLMTTEKNLRLQLASDGERFQHFQDALSKSNEVFETYKQEMEKMISVIKNLKKENEFLKGKCENSDIAIVKLIEERELTKKQIEKLKNQREKLESLCRTLQAERKQGPSASIPDAPSSQEVSATSQES

SEQ ID NO: 3283 - protein, 411 aa, Zea mays
  misc_feature (393)..(393): Xaa can be any naturally occurring amino acid
MEGSPVARLPEANSLPDGFVPDSESSDTDAAPPSSAPIVDDAIDSDSPDATNPGGEETLSDPSLPASTAEDASSAAAAEALDTLCLDVVADPERALGEHGPTTAARGEGSLKENRASEQVGAPSDQKGSGEPKRKVIKHSKLEKDKELFQLAQQYHKVVAERDQAIAVKDRLESLCREFQRQNKMLKEECQRVSTEGQNMRTELSEKFDHAIKGVSAKLEEQRVERISQLEENNTLRSKLKDLADQYNITQQKYAHQLKEKMLELELADLRLQQHQEKAAQEHTQMQLYAEQVSQLMTTEKNLRLQLASDGERFQHFQDALSKSNEVFETYKQEMEKMISVIKNLKKENEFLKGKCENSDIAIVKLIEERELTKKQIEKLKNQREKLESLCRXLQAERKQGPSRQYSRCPF

SEQ ID NO: 3284 - protein, 352 aa, Oryza sativa Indica Group
MAAAGWPLSSSVADLLPASLSLTLLLASLVVVVVLGAAAFFFEHIRKIGCTHSLERTEVSAAFFEDPNSLNKVRCPSIYDPAEKYISLIIPAYNEEHRLPEALTETLNYLKQRSAVEKSFTYEVLIVDDGSTDHTSKVAFEFVRKHKIDNVRVLLLGRNHGKGEAVRKGMLHSRGELLLMLDADGATKVTDLEKLEAQVRALAKKAESSLAPSNSPSQRLSDAEIAVFGSRAHLEKQALATRKWYRNFLMKGFHLVVLLTAGPGIRDTQCGFKMFTRAAARKLFTNIRLKRWCFDVELVYLCKHLRIPMAEVSVNWTEIPGSKVRMTSILHMVFELLLIKVGYGLSIWKIYS

SEQ ID NO: 3285 - protein, 314 aa, Sorghum bicolor
MAAAEVYSPTAAAAAQQQQRGKAASQAWRAVVGWIGFLLQVLLQILRGTPSCAQLLSFVGFRYPLLSGPAASEPSPEVAFMPLHSEIPADADAAPAPIPAPEPLGRLTVVLDLDETLVSAYESSSLPAIVRTQAVEAGLHCFDMECISSDKDVEGKQKVNHVTVFERPGLHEFLLKTSEFADLILFTAGLEGYARPLVDRIDVHNRFRLRLYRPSTVTTEYREHVKDLSCVSKDFGRIVIVDNNPFSFILQPLNGIPCVPFSAGQHSDDQLMTVIFPLLKHLSLQKDVRPVLHERFHMPEWFQKHGIPPTNQAV

SEQ ID NO: 3286 - protein, 311 aa, Zea mays
MAATEVYSPTTAAAAQQQRGKAASQAWRAVVGWIGFFLQVLLQILRGTPSCAQLLSFVGFRYPLLSGPAASEPLPEVAFMPLHSEIPADAAPAPKPASEPLGRLTVVLDLDETLVSAYESSSLPAIVRTQAVEAGLHCFDMECISSDKDVEGKQKVNHVTVFERPGLHEFLRKTSEFADLILFTAGLEGYARPLVDRIDVHNRFRIRLYRPSTVTTEYREHVKDLTRVSKDFGRIVIVDNNPFSFILQPLNGIPCVPFSAGQHSDDQLMTVIFPLLKHLSLQKDVRPVLRERFHMPEWFQNHGIPQISQAV

SEQ ID NO: 3287 - protein, 364 aa, Zea mays
MAAAEVYSPTAAAAAQQQREKAASQAWRTVVGWIGFLVQVLLQILRGTPSCAQLLSFVGVRYPLLSGPTASNPSPEVAFMPLRSEIPADAAPAPTPAPEPLGRLKVVLDLDETLVSAYESSSLPTIVRTQAVEAGLHCFDMECISSDKDAEGKQKVNHVTVFERPGLHEFLQKTSEFADLILFTAGLEGYARPLVDRIDVHNRFRLRLYRPSTVTTEYREHVKDLSCVSKDFGRIVIVDNNPFSFILQPLNGIPCVPFSAGQHSDDQLMMVIFPLLKHLSLQKDVRPVLHERFHMPEWFQKHGIPQTNQSVLTGRIIDERRRRLKSDVVEMLTCIKNWEDAEARMQHMVDDKELEETFENVYLD

SEQ ID NO: 3288 - protein, 311 aa, Zea mays
MAAAEVYSPTAAAAAQQQREKAASQAWRTVVGWIGFLVQVLLQILRGTPSCAQLLSFVGVRYPLLSGPTASNPSPEVAFMPLRSEIPADAAPAPTPAPEPLGRLKVVLDLDETLVSAYESSSLPTIVRTQAVEAGLHCFDMECISSDKDAEGKQKVNHVTVFERPGLHEFLQKTSEFADLILFTAGLEGYARPLVDRIDVHNRFRLRLYRPSTVTTEYREHVKDLSCVSKDFGRIVIVDNNPFSFILQPLNGIPCVPFSAGQHSDDQLMMVIFPLLKHLSLQKDVRPVLHERFHMPEWFQKHGIPQTNQSV

SEQ ID NO: 3289 - protein, 312 aa, Oryza sativa Indica Group
MAAAEVYSPTAAAAAQQQQRGKVAAQAWQAVVGWIGFLLQVLLQILRGTPSCAQLLSFVGFRYPLLSGPADSEQSPSVAFMPLRSEIPADTAPAPTPPPESLQRLTVVLDLDETLVSAYESSSLPAIVRTQAVEAGLHCFDMECISTEKDVEGRNKVNHVTVFERPGLHEFLQKTSEFADLILFTAGLEGYARPLVDRIDVHNRFKLRLYRPSTVTTEYREHVKDLSCVSKDFCRVVIVDNNPFSFILQPLNGIPCVPFSAGQHNDDQLMEVIFPLLKHLSIQRDVRPALYERFHMPEWFQKHGIPQTDQAV

SEQ ID NO: 3290 - protein, 312 aa, Oryza sativa Japonica Group
MAAAEVYSPTAAAAAQQQQRGKVAAQAWQAVVGWIGFLLQVLLQILRGTPSCAQLLSFVGFRYPLLSGPADSEQSPSVAFMPLRSEIPADTAPAPTPPPESLQRLTVVLDLDETLVSAYESSSLPAIVRTQAVEAGLHCFDMECISTEKDVEGRNKVNHVTVFERPGLHEFLQKTSEFADLILFTAGLEGYARPLVDRIDVHNRFKLRLYRPSTVTTEYREHVKDLSCVSKDFCRVVIVDNNPFSFILQPLNGIPCVPFSAGQHNDNQLMEVIFPLLKHLSIQRDVRPALYERFHMPEWFQKHGIPQTDQAV

SEQ ID NO: 3291 - protein, 313 aa, Hordeum vulgare subsp. vulgare
MAAAEVYSPTAAAAAQHQQRGKAATQAWQAVVGWIGFLLQVLLQILRGTPSCAQLLSFVGFRYPLLSATAGPDQPSPEVAFMPLRSEIPADAAPVPAPPPEPLERLTVVLDLDETLVSAYESSGLPPIVRTQAVEAGLHCFDMECISTDKDVEGKQKVNHVTVFERPGLHEFLQKTSEFADLILFTAGLEGYARPLVDIIDAHNRFKLRLYRPSTVTTEYREHVKDLSCLSKQFSRIVIVDNNPFSFILQPLNGIPCVPFSAGQHSDDQLMEVIFPLLKHLSVQRDVRPALYERFHMPEWFQKHGIPQTDQAT

SEQ ID NO: 3292 - protein, 295 aa, Sorghum bicolor
MSAATEVAPVQQRSHAAAVWRAVAGWLGLLFQILLRIIRSTPSSWAQLLSFVGLRHPLLPVASSPEVAFVQLPSEAPADVSPPPLRRLTVVLDLDETLVCAYESSSLPATVRTQAVEAGLHCFDMECVSSEKDPDGRQRINHVTVFERPGLHEFLQRTSEFADLVLFTAGLEGYAKPLVDRIDAHNRFTHRLYRPSTVTTEYREHVKDLSCLSKDFQRIVLVDNNPYSFLLQPLNGIPCITFSAGQPVDDQLMGTIFPLLEHLALQKDVRPALYETFHMPEWFQRQGIPQTEQAV

SEQ ID NO: 3293 - protein, 326 aa, Oryza sativa Indica Group
MAAAEFLSPEAAAAAGVGPVRQQQHPGEAAWRAVVGWLGFLLQILLQIVRGTPSSWAHLLSFLGLRHPLLSAAPPQPSPSPSPSVAFVRLPSEAPADASSTGPPPPLRRLTVVLDLDETLVCAYESSSLPAALRAEAVEAGLHCFEMECISAEKASCIFLDIKDAEGSQRVNRVTVFERPGLHEFLQRTSEFADLILFTAGLEGYAKPLVDRIDAHNRFCHRLYRPSTVTTEYREHVKDLSCLSKDFHRIVLVDNNPYSFLLQPLNGIPCLTFSAGQPVDDQLMGVIFPLLKHLSLQNDVRPALYETFHMPEWFQRHGIPQIDQAA

SEQ ID NO: 3294 - protein, 300 aa, Hordeum vulgare subsp. vulgare
MAAATEVYSPMPAAQHRGQAAWRAVVGWLGLLLQVLLRAIRGTPSSLAKLLRSLGLRHPLLSAAPAVAFVQLPSKAPSDSDDLPPLSPPPGRLTVVLDLDETLVCAYESSSLPATVRTQAVEAGLHCFDMECISSDKDAKGRQRVNHVTVFERPGLHEFLQKTSEFADLILFTAGLEGYAKPLIDRIDAHNRFYRRLYRPSTVTTEYRDHVKDLSCLSKDFRRVVLVDNNPYSFLLQPLNGIPCHTFSAGQPMDDQLMRVIFPLLKHLSLQNDVRPALRDAFHMPEWFQSNGIPQIDQAM

SEQ ID NO: 3295 - protein, 380 aa, Sorghum bicolor
MAPAAAASRVAVSSPVFGSDGGARSSGIKGNNNVSFGNKSWVGGTLAWESSSVRPRHVNKVLCMSVQQASKSKVSVAPLDLESAKEPPLNTYKPKEPFTATIVSVERLVGPKAPGETCHIVIDHGGNVPYWEGQSYGVIPPGENPKKPGAPQNVRLYSIASTRYGDYFDGRTGSLCVRRAVYYDPETGKEEPSKNGVCSNFLCNSKPGDKIQLTGPSGKIMLLPEEDPNATHIMIATGTGVAPFRGYLRRMFMEDVPNYRFGGLAWLFLGVANSDSLLYDEEFTSYLKQYPDNFRYDKALSREQKNRSGGKMYVQDKIEEYSDEIFKLLDGGAHIYFCGLKGMMPGIQDTLKKVAEQRGESWDQKLSQLKKNKQWHVEVY

SEQ ID NO: 3296 - protein, 381 aa, Zea mays
MATAAAASRVAVSAPVFGSDGGARSSGIKGNNNVSFGSKSWVGGTLAWESSCSVRPRHASKVLCMSVQQASRSKVSVAPLHLESAKEPPLNTYKPKEPFTATIVSVESLVGPKAPGETCHIVIDHGGNVPYWEGQSYGVIPPGENPKKPGAPQNVRLYSIASTRYGDNFDGRTGSLCVRRAVYYDPETGKEDPSKNGVCSNFLCNSKPGDKIQLTGPSGKIMLLPEEDPNATHIMIATGTGVAPFRGYLRRMFMEDVPNYRFGGLAWLFLGVANSDSLLYDEEFTSYLKQYPDNFRYDKALSREQKNRSGGKMYVQDKIEEYSDEIFKLLDGGAHIYFCGLKGMMPGIQDTLKKVAERRGESWDQKLAQLKKNKQWHVEVY

SEQ ID NO: 3297 - protein, 378 aa, Oryza sativa Japonica Group
MATAVASQVAVSAPAGSDRGLRSSGIQGSNNISFSNKSWVGTTLAWESKATRPRHANKVLCMSVQQASESKVAVKPLDLESANEPPLNTYKPKEPYTATIVSVERIVGPKAPGETCHIVIDHGGNVPYWEGQSYGIIPPGENPKKPGAPHNVRLYSIASTRYGDSFDGRTTSLCVRRAVYYDPETGKEDPSKNGVCSNFLCNSKPGDKVKVTGPSGKIMLLPEEDPNATHIMIATGTGVAPFRGYLRRMFMEDVPKYRFGGLAWLFLGVANTDSLLYDEEFTSYLKQYPDNFRYDKALSREQKNKNAGKMYVQDKIEEYSDEIFKLLDGGAHIYFCGLKGMMPGIQDTLKKVAEQRGESWEQKLSQLKKNKQWHVEVY

SEQ ID NO: 3298 - protein, 376 aa, Hordeum vulgare subsp. vulgare
MATAAASQVAFSAPVPGSDRAVRSSGIKGTNSLSFGNKSWIGTALACDGKAVLQQRHVCRAVQQSSKSKVSVAPLDLESAKEPPLNTYKPKGPYTATIVSVERAVGPNAPGETCHVVIDHGGNVPYWEGQSYGIIPPGENPKKPGNPQNVRLYSIASTRYGDSFDGKTASLCVRRAVYYDPETGKEDPSKNGVCSNFLCNSKPGDKIQLTGPSGKIMLLPESDPNATHIMIATGTGVAPYRGYLRRMFMEDVPNYRFGGLAWLFLGVANSDSLLYDEEFTSYLKQYPDNFRFDKALSREQKNKSGGKMYVQDKIEEYSDEIFKLLDGGAHIYFCGLKGMMPGIQDTLKKVAEQRGESWDQKLSQLKKNKQWHVEVY

SEQ ID NO: 3299 - protein, 378 aa, Oryza sativa Japonica Group
MASALGAQASVAAPIGAGGYGRSSSSKGSNTVNFCNKSWIGTTLAWESKALKSRHMNKIFSMSVQQASKSKVAVKPLELDNAKEPPLNLYKPKEPYTATIVSVERLVGPKAPGETCHIVIDHGGNVPYWEGQSYGVIPPGENPKKPGSPNTVRLYSIASTRYGDSFDGKTASLCVRRAVYYDPETGKEDPTKKGICSNFLCDSKPGDKVQITGPSGKIMLLPEDDPNATHIMIATGTGVAPYRGYLRRMFMEDVPSFKFGGLAWLFLGVANTDSLLYDEEFTNYLQQYPDNFRYDKALSREQKNKNGGKMYVQDKIEEYSDEIFKLLDGGAHIYFCGLKGMMPGIQDTLKRVAEQRGESWEQKLSQLKKNKQWHVEVY

SEQ ID NO: 3300 - protein, 381 aa, Zea mays
MAPPALGSQVAAAASVPVGSDSLAKGAALKGNSTLNFRTKPCIGMALAWKNRTQQPRRLNKVLCMSVQQASRSKVAVVPIELEKAKEPPLHLYKPKEPYTATIVSVERLVGPRAPGETCHVVIDHGGNVPYWEGQSYGVIPPGENPKKPGSPNTVRLYSIASTRYGDSFDGKTASLCVRRAVYYDPETGEEDPSKRGVCSNFLCGSKPGDKVQITGPSGKIMLLPEDDPNATHIMIATGTGVAPYRGYLRRMFMEDVPTFKFGGLAWLFLGVANSDSLLYDEEFTNYLQQYPDNFRYDKALSREQKNKSGGKMYVQDKIEEYSDEIFRLLDGGAHIYFCGLKGMMPGIQDTLKKVAEQRGESWDQKLSQLKKNKQWHVEVY

SEQ ID NO: 3301 - protein, 381 aa, Zea mays
MAPPALGSQVAAAASVPVGSDSLAKGAALKGNSTLNFRTKPCIGMALAWKNRTQQPRRLNKVLCMSVQQASRSKVAVMPVELEKAKEPLLHLYKPKEPYTATIVSVERLVGPRAPGETCHVVIDHGGNVPYWEGQSYGVIPPGENPKKPGSPNTVRLYSIASTRYGDSFDGKTASLCVRRAVYYDPETGEEDPSKRGVCSNFLCGSKPGDKVQITGPSGKIMLLPEDDPNATHIMIATGTGVAPYRGYLRRMFMEDVPTFKFGGLAWLFLGVANSDSLLYDEEFTNYLQQYPDNFRYDKALSREQKNKSGGKMYVQDKIEEYSDEIFRLLDGGAHIYFCGLKGMMPGIQDTLKKVAEQRGESWDQKLSQLKKNKQWHVEVY

SEQ ID NO: 3302 - protein, 379 aa, Oryza sativa Indica Group
MASALGAQASVAAPIGAGGYGRRSSSSKGSNTVNFCNKSWIGTTLAWESKALKSRHMNKIFSMSVQQASKSKVAVKPLELDNAKEPPLNLYKPKEPYTATIVSVERLVGPKAPGETCHIVIDHGGNVPYWEGQSYGVIPPGENPKKPGSPNTVRLYSIASTRYGDSFDGKTASLCVRRAVYYDPETGKEDPTKKGICSNFLCDSKPGDKVQITGPSGKIMLLPEDDPNATHIMIATGTGVAPYRGYLRRMFMEDVPSFKFGGLAWLFLGVANTDSLLYDEEFTNYLQQYPDNFRYDKALSREQKNKNGGKMYVQDKIEEYSDEIFKLLDGGAHIYFCGLKGMMPGIQDTLKRVAEQRGESWEQKLSQLKKNKQWHVEVY

SEQ ID NO: 3303 - protein, 381 aa, Sorghum bicolor
MASPALGSQVAAAASVPVGSDCCFKGTALKGNSNLNFRNKPCIGMALAWKNKTQQSRHLNKVFCMSVQQASRSKVAVKPIELENAKEPPLNLYKPKEPYTATIVSVERIVGPKAPGETCHIVIDHGGNVPYWEGQSYGVIPPGENPKKPGSPNTVRLYSIASTRYGDSFDGKTTSLCVRRAVYYDPETGEEDPSKKGICSNFLCDSKPGDKVQITGPSGKIMLLPEDDPKATHIMIATGTGVAPYRGYLRRMFMEDVPTFKFGGLAWLFLGVANSDSLLYDEEFTNYLQQYPYNFRYDKALSREQKNKNGGKMYVQDKIEEYSDEIFKLLDGGAHIYFCGLKGMMPGIQDTLKRVAEQRGESWDQKLSQLKKNKQWHVEVY

SEQ ID NO: 3304 - protein, 381 aa, Zea mays
MATAAAASRVAVSAPVFGSDGGARSSGIKGNNNVSFGSKSWVGGTLAWESSCSVRPRRASKVLCMSVQQASRSKVSVAPLHLESAKEPPLNTYKPKEPFTATIVSVESLVGPKAPGETCHIVIDHGGNVPYWEGQSYGVIPPGENPKKPGAPQNVRLYSIASTRYGDNFDGRTGSLCVRRAVYYDPETGKEDPSKNGVCSNFLCNSKPGDKIQLTGPSGKIMLLPEEDPNATHIMIATGTGVAPFRGYLRRMFMEDVPNYRFGGLAWLFLGVANSDSLLYDEEFTSYLKQYPDNFRYDKALSREQKNRSGGKMYVQDKIEEYSDEIFKLLDGGAHIYFCGLKGMMPGIQDTLKKVAERRGESWDQKLAQLKKNKQWHVEVY

SEQ ID NO: 3305 - protein, 327 aa, Zea mays
VAVGASKVLCMSVQQASRSKVSVAPLHLESAKEPPLNTYKPKEPFTATIVSVESLVGPKAPGETCHIVIDHGGNVPYWEGQSYGVIPPGENPKKPGAPQNVRLYSIASTRYGDNFDGRTGSLCVRRAVYYDPETGKEDPSKNGVCSNFLCNSKPGDKIQLTGPSGKIMLLPEEDPNATHIMIATGTGVAPFRGYLRRMFMEDVPNYRFGGLAWLFLGVANSDSLLYDEEFTSYLKQYPDNFRYDKALSREQKNRSGGKMYVQDKIEEYSDEIFKLLDGGAHIYFCGLKGMMPGIQDTLKKVAERRGESWDQKLAQLKKNKQWHVEVY

SEQ ID NO: 3306 - protein, 316 aa, Zea mays
SVQQASRSKVSVAPLHLESAKEPPLNTYKPKEPFTATIVSVESLVGPKAPGETCHIVIDHGGNVPYWEGQSYGVIPPGENPKKPGAPQNVRLYSIASTRYGDNFDGRTGSLCVRRAVYYDPETGKEDPSKNGVCSNFLCNSKPGDKIQLTGPSGKIMLLPEEDPNATHIMIATGTGVAPFRGYLRRMFMEDVPNYRFGGLAWLFLGVANSDSLLYDEEFTSYLKQYPDNFRYDKALSREQKNRSGGKMYVQDKIEEYSDEIFKLLDGGAHIYFCGLKGMMPGIQDTLKKVAERRGESWDQKLAQLKKNKQWHVEVY

SEQ ID NO: 3307 - protein, 153 aa, Sorghum bicolor; identical to SEQ ID NO: 1554

SEQ ID NO: 3308 - protein, 153 aa, Zea mays
MDMATAAAALPWGGGSPAWIDVPERSKSAFMELKRRKVHRYVIFKIDDSREEVVVDKIGAPGESYDDFTASLPTDDCRYAVYDLDFVSDDNCRKSKIFFISWSPSDSRIRAKTIYAVSRNQFRHELDGVHFEIQATDPDDMNLEVLRGRANRT

SEQ ID NO: 3309 - protein, 153 aa, Oryza sativa Japonica Group
MVAAAAAVLPWGGGGSPAWIEVPEKSKSAFWELKRRKVHRYVIFKIDDRREEIVVEKTGAPGESYDDFTASLPADDCRYAVYDLDFVSDDNCRKSKIFFISWSPSVSRIRAKTIYAVSRNQFRHELDGVHFEIQATDPDDMDLEVLRGRANRT

SEQ ID NO: 3310 - protein, 151 aa, Oryza sativa Japonica Group
MEILGFTVMGGGGSPAWIEVPEKSKSAFWELKRRKVHRYVIFKIDDRREEIVVEKTGAPGESYDDFTASLPADDCRYAVYDLDFVSDDNCRKSKIFFISWSPSVSRIRAKTIYAVSRNQFRHELDGVHFEIQATDPDDMDLEVLRGRANRT

SEQ ID NO: 3311 - protein, 146 aa, Oryza sativa Japonica Group
MEILGFTVMGGGSPAWIEVPEKSKSAFWELMRRKVHRYVIFKIDDRREEIVVEKTGAPWESYDDFTASLPADAVYDLDFVSDDNCRKSKIFFISWSPSLSCIRAKTIYAVWRNQFRHELDGVHFEIQATDPDDMDLEVLRGRANRT

SEQ ID NO: 3312 - protein, 143 aa, Oryza sativa Japonica Group
MEILGFTVMGGGSPAWIEVPEKSKSAFWELMRRKVHRYVIFKIDDRREEIVVEKTGAPWESYDDFTASLPADAVYDLDFVSDDNCRKSKIFFISWSPSLSCIRAKTIYAVWRNQFRHELDGVHFEIQATDPDDMDLEVLRGRG

SEQ ID NO: 3313 - protein, 494 aa, Sorghum bicolor
MTKAATLYGSKTQSDALRPGPLRPANFIRNKFPTYKNGSNGIVIKLADGPEMPPLKEIVAKETADLLDRRQRLSVRELAMKFEKGLNTATLLSNEVKWRQVALLERDILLKNLKSVLESLRGQVTGKTKDEIEESISMVEILAVQLSKREAELLQQKEEVTKLAKSLKQASEDAKRIVEEERANAHTEIETAKSAVQRVQQAVQEHEKMSQNTGKQDMEELKKEVREARRIKMLHQPSKAMDLENEIRILRNTFAEKSKDCVNLLKELEMHKRLKENGTIPSFDLEGLQCLGSMLRIVGLSGTHMDLSNISIQWFRIHPKESNKEIISGATRPVYALEPHDVGRYLQAEIDVGGEIAVAKTAGPVDPDAGLVDYVETLVRKPETEFNVVVLQLNGVDQPKESVHVLNVGRLRMRLTKGKSVVAKEFYSSSMQLCGVRGGGEAASQAMFWRPRNDLSLVLAFESTRERNTAIMLARRFAIDCNIILAGPGDKTPW

SEQ ID NO: 3314 - protein, 503 aa, Oryza sativa Japonica Group
MTRAVTLDYGGKVQTRDYGGKAQTETLRPGPLRPANIIRAKFPTYKNGLNGIVVKLADGPEMPSLKETVTKETADMLDHRQRLSVRELAMKFEKGLNTATLLSNEVKWRQVALLERDILLKNLKTVLESLRGRVTGKTKAELEDSISMVDILAVQLSKREAELLQQKAEVTELAKSLKLASEDAKKIVDEERASAHTEIESARSSVQRVQQALQEHEKMSRTTGKQDMEELKKEVREARRIKMLHYPSKAMDLENEIKILRKTFVERSTDCVNLLKELELHKRPEGNDIPLFDLEGLQCLGSILRIVSQSSTTMDFSNISIQWFRVHPKESNKEIISGATRSVYAPEPHDVGRYLEAEINYGGEIAIAKTAGPIDPDAGLVDYVETLVRKRETEFNVVVLQLNGIDQPKESVHVLNIGKLRMRLSKGKTVVAKEFYSSSMQLCGVRGGGEAASQAMFWRPRNDLSMVLAFETTRERNTAIMLTRRFAIDCNIILAGPGDKTPW

SEQ ID NO: 3315 - protein, 494 aa, Oryza sativa Japonica Group
MTRASTIDFGRKTHNDVLWSGPLRPANFIRNKFPTYKKSLNGIVIKLTDDQEMPSLKEAVAKETADLLHRSQRLSVRELAMKFEKGLNTATLLSNEVKWRQAALLERDILLKNLKSVLESLRSRVAGKHKDEIEESLSMVDVLTVQLSKREDELLQQKAEVAKIATSLKLASEDARRIVEEERSNARIEIDNARAAVQKVEQLVKEQEIDPQINGKQDEDELKEKAQEARRVKMLHCPSKAMDIENEIEVLREQLAEKSSNCVHLLKELHLHQSYEENDVSSYELEGLESLGSMLRIVSQSDGYVDLSRSTIQWFRVQPEGNKKEIISGAIKQAYAPEPHDVGRYLQAEINHCGEISVVKTAGPVDPAAGLVDYVETLLRNPETEYNVVVLQVNGIKQPTDSIHVLSIGKLRMRLAKGKTVIAKEFYSSTMQLCGMRGGGDAAPQAMYWQPRRDLSLVLGFETARERNSAIMLARRFAIDCNIILAGPGDKTHW

SEQ ID NO: 3316 - protein, 494 aa, Zea mays
MTRASTIDFGRRKQSELFGSGPLRPANIIRNKFPTYKNGSNGIVIKLADGPEMPSLKEAVAKEATDLLDRCQRPSVRELTMKFEKGFNTATLLSNEAKWRHAALLERDILLKDLKSVLESLRGRVGGKNKDEIVESLSMVDILAIELSKREDELLRQKTEVTKIADTLKLASTDAKRIIDEERANARLEIESAKASVQKIQSALKEQELFSQRTGKQDVDELKEEVQEARRVKMLHCPSKAMDIENEIQVLRDQLAEKSSDSLRLLKELELHRSYGENDMPLYELKGLETLGSTLRIVVHECASVDFSNSSIQWFRIQPEGSKKEIISGATKPVYAPEPHDVGRYIQAEVKSGGQISVAKTAGSIDPAAGLVEYVETLVRNPETDYNVVIIQVNGVAQAADSVHVLCIGRLRMRLAKEKTVVAKEFYSSSMQLCGVRGGGDAAPQSIFWQPRKGLSFVLAFETTRERNSALMLARRFAIDCNIILGGPGDKTSW

SEQ ID NO: 3317 - protein, 494 aa, Oryza sativa Indica Group
MTRASTIDFGRKTHNDVLWSGPLRPANFIRNKFPTYKKSLNGIVIKLTDDQEMPSLKEAVAKETADLLDRSQRLSVRELAMKFEKGLNTATLLSNEVKWRQVALLERDILLKNLKNVLESLRSRVAGKHKDEIEESLSMVDILTVQLSKREDELLQQKAEVAKIATSLKLASEDARRIVEEERSNARIEIDNARAAVQKVEQLVKDQEIDPQINGKQDEDELKEKAQEARRVKMLHCPSKAMDIENEIEVLREQLAEKSSNCVHLLKELHLHQSYEKNDVSSYELEGLESLGSMLRIVSQSDGFVDLSRSTIQWFRVQPEGNKKEIISGAIKQAYAPEPHDVGRYLQAEINHCGEISVVKTAGPVDPAAGLVDYVETLLRNPETEYNVVVLQVNGIKQLTDSIHVLSVGKLRMRLAKGKTVIAKEFYSSTMQLCGMRGGGDAAPQSMYWQPRRDLSLVLGFETARERNSAIMLARRFAIDCNIILAGPGDKTHW

SEQ ID NO: 3318 - protein, 498 aa, Sorghum bicolor
MTRSSTIDFGRRKQSELFGSGPLRPANIIRNKFPTYKNGSNGIVIKLVDAPEMPSLKEAVAKETTDLLDRCQRLSVRELTMKFEKGFNTATLLSNEAKWRHAALLERDILLKNLKSVLESLRGRVGGKNKDEIEESLSMVDILAVELSKREDELLQQKTEITKIAATLKLASKDAKRIVDEERANARLEIESAKAAVHKIQLALKEQENFYQRTGKQDVDELKEEVQEARRVKMLHCPSKAMDIENEIQVLRDQLSEKSSTSLHLLKELELHRSYEENAMPLCELKGLETLGSMLRIVVQDCAHVDFSNCSIQWFRIQPEGSNQEIISGATKPVYAPEPHDVGRYIQAEIKFGGQISIAKTAGPIDPAPGLVDYVEALVRNPETDYNVVILQVNGIAQAADSLHVLCIGRLRMRLAKEKAVVAKEFYSSSMQLCGVRGGGDAAPQAIFWQPRKDLSFVLAFETTRERNSALMLARRFAIDCNIILTGPGDKTPAHSET

SEQ ID NO: 3319 - protein, 492 aa, Hordeum vulgare subsp. vulgare
MTRASTLDFRRKAQNQNNWSGPLRPANIIRNKFPTYKNGLNGIVIKFADEPETPSLKESVAKETEDLLGRRQRLSVRELAMKFEKGLSTATLLSNEVKCKQVALLERDILLKNLKSVLESLRGQVAGKYKDEIEESVSMVDILAVQLSKRENELLQQKTEVTRIATSLKLASEDARRIVDEERTNARTEIENARAAVQRVQKVLKEKENSSQRIVKQDVDELKEKVQEARRVKMLHCPSEAMDIKSEIHVLRDQYAEISSSSTHLLKELKLHQSFKENGVLSCGLEGLESLGSMLHVVVDNDVALSNNSVQWFRIQPGGHKKEIISGATKLVYAPEPHDVGRYLQAEVNLGGEISVAKTAGPLDPAPGLVDYVETLVRNPETDYNVVVLKVNGINQPTDSIHVLCVGKLRMRLAKGTTVVAREFYSSSMQLCGVRGGGDAAPQAMFWQPREGLSLVLGFETPRERNSGIMLARRFAIDCNIVLAGPGDKTPW

SEQ ID NO: 3320 - protein, 224 aa, Coix lacryma-jobi
MGQKINPLGFRLGTTQNHHSFWFAQPKNYSEGLQEDKKIRNCIKNYIKKNRKKGSNRKMESDSSSEVIAHIEIQKEIDTIHVIIHIGFPNLLKKKGAIEELEKDLQKEVNSVNQRLNIAIEKVKEPYRQPNILAEYIAFQLKNRVSFRKAMKKAIELTKKVDIKGIKIQIAGRLAGKEIARAECIKKGRLPLQTIRAKIDYCCYPIRTIYGVLGVKIWIFVEEE

SEQ ID NO: 3321 - protein, 239 aa, Indocalamus longiauritus
MGQKINPLGFRLGTTQNHHSFWFAQPKNYSEGLQEDKKIRNCIKNYIQKNRKKGSNRKIESDSSSEVITHNRKMDSGSSSEVITRIEIQKEIDTIHVIIHIGFPNLLKKKGAIEELEKDLQKEVNSVNQRLNIAIEKVKEPYRQPNILAEYIAFQLKNRVSFRKAMKKAIELTKKADIRGVKVKIAGRLAGKEIARAECIKKGRLPLQTIRAKIDYCCYPIRTIYGVLGVKIWIFVDEE

SEQ ID NO: 3322 - protein, 239 aa, Puelia olyriformis
MGQKINPLGFRLGTTQNHHSFWFAQPKNYSEGLQEDKKIRNCIKNYIQKNRKKGSNRKIDSDSSSEVITHNRKIDSGSSSEVITHIEIQKEIDTIHVIIHIGFPNFLKKKGAIEELEKDLQKEVNSVNQRLNIAIEKVKEPYRQPNILAEYIAFQLKNRVSFRKAMKKAIELTKKADIKGVKVKIAGRLAGKEIARAECIKKGRLPLQTIRAKIDYCCYPIRTIYGVLGVKIWIFVDEE

SEQ ID NO: 3323 - protein, 239 aa, Bambusa emeiensis
MGQKINPLGFRLGTTQNHHSFWFAQPKNYSEGLQEDKKIRNCIKNYIQKNRKKGSNRKIESDSSSEVITHNRKMDSGSSSEVITHIEIQKEIDTIHVIIHIGFPNLLKKKGAIEELEKDLQKEVNSVNQRLNIAIEKVKEPYRQPSILAEYIAFQLKNRVSFRKAMKKAIELTQKADIRGVKVKIAGRLAGKEIARAECIKKGRLPLQTIRAKIDYCCYPIRTIYGVLGVKIWIFIDEE

SEQ ID NO: 3324 - protein, 157 aa, Zea mays
MALGTQCPCSSSWQPGGAPPHGRASNLPFELPQTQVQGAPASSMAARARPSPSMELGVAPFAARCSSSPPLGDPPDASPERVDVAASTNSGVMASYLGRFLAGDEAPLRTTNPPWAGLCTSFPPHEDTCHLKSKLVPGISRPRQVVPLITSFYPLMF

SEQ ID NO: 3325 - protein, 527 aa, Hordeum vulgare subsp. vulgare; identical to SEQ ID NO: 1555

SEQ ID NO: 3326 - protein, 525 aa, Sorghum bicolor
MAGGERDDAVAMDSGEKRLNELGYKQELRREMTLFKTLAISFSTMTLFTGITPLYGSSLQYAGPAPLVWGWVVVSFFTWFVGIAMAEICSSFPTTGSLYFWAAHLAGPVWGPLASWCCAWLEAIGLIAGIGTQAYAGSQVLQSIILLCTGTNTGGGYLAPRWLFLVMYIGLTLIWAVLNTFALEVIAFLDVISMWWQVIGGTVIVIMLPLVAKTTQPASYVFTHFQTSPDVTGISSSSYAVVLSFLVSQYSLYGYDAAAHLTEETKGADKNGPIAILSSIGIISVFGWAYILALTFSIQDFSYLYDASNETAGAFVPAQILYDAFHGRYGSSAGAIVLLLVIWGSFFFGGLSITTSAARVVYALSRDRGVPLSSVWRRIHPRHKVPANAVWLCAAVCALLGLPILRINVVFTAITSIATIGWVGGYAVPIFARMVMREDDFRPGPFYLGRASRPVCLVAFLWICYTCSVFLLPTVYPIKMDTFNYAPIALGVVLGLIMLWWLLDARKWFKGPVRNIDEHNNGSKV

SEQ ID NO: 3327 - protein, 525 aa, Zea mays
MAGGGEREGAQAMDSGEKRLNELGYKQELRREMTLFKTLAISFSTMTLFTGITPLYGSSLQYAGPAPLVWGWVVVSFFTCFVGVAMAEICSSFPTTGSLYFWAAHLAGPVWGPLASWCCAWLEAIGLIAGIGTQAYAGSQVLQSIILLCTGTNTGGGYLAPRWLFLVMYIGLTLIWAVLNTFALEVIAFLDVISMWWQVIGGTVIVVMLPLVAKTTQPASYVFTHFQTAPDVTGIGSSAYAVVLSFLVSQYSLYGYDAAAHLTEETKGADKNGPIAILSSIGIISVFGWAYILALTFSIQDFSYLYNPNNETAGTFVPAQILYDAFHGRYNSSAGAIVLLFVIWGSFFFGGLSITTSAARVVYALSRDQGVPLSSVWRRIHPRHKVPANAVWLCAAVCTLLGLPILRINVVFTAITSIATIGWVGGYAVPIFARMVMREDDFRPGPFYLGRASRPVCLVAFLWICYTCSVFLLPTVYPIKMDTFNYAPIALGVCLGLIMLWWLLDARKWFKGPVRNINDHHNGKG

SEQ ID NO: 3328 - protein, 530 aa, Oryza sativa Japonica Group
MAGEVAIDSGEKRLNELGYKQELRREMTLFKTLAISFSTMTLFTGITPLYGSSLRYTGPASLVWGWVVVSFFTWFVGFAMAEICSSFPTTGSLYFWAAHLAGPVWGPLASWCCAWLEAIGLIAGIGTQAFAGSQVLQSIILLCTGTNKGGGYLTPRWLFLLMYIGLTFIWAVLNTFALEVIAFLDLISMWWQVIGGTVIVIVLPLVAKTTQPASYVFTHFETAPEATGIRSSAYATILSLLVSQYSLYGYDAAAHLTEETKGADKNGPIAILSSIGIITVFGWAYILALTFSIQDFSYLFDPSNETAGTFVPAQILFDAFHGRYGSSAGAIALLFVIWGSFFFGGLSITTSAARVVYALSRDRGVPLSSVWRRVHPRHRVPANAVWLCAAACALLGLPILWINVVFTAITSIATIGWVGGYAVPIFARMVMREEDFSPGPFYLRRASRPVCLVAFLWICYTCTVFLLPTAYPISAGNFNYAPVALGACLGLIGLWWVLDARRWFKGPVRNIDDPLKDGGGDGVHNNGNKV

SEQ ID NO: 3329 - protein, 538 aa, Populus trichocarpa
MGFRRPEAAQVQEMDPGEKRLNELGYKQELRREMTLFKTLAISFSTMTLFTGITPLYGSSLLYAGPASLVWGWVVVSFFTWFVGIAMAEICSSFPTTGSLYFWAAHLAGPRWGPFASWCCAWLETIGLVAGIGTQAYAGSQTLQSIILLCTGTNKDGGYFAPKWLFLCMYIGLTLIWAVLNTFALEVIAFIDVISIWWQVIGGLVIVIMLPLVSLTTQSASYVFTHFETAPDSTGISSKPYVVVLSFLVSQYSLYGYDAAAHLTEETKGADKNGPIAILSSIGIITVFGWAYILALTFSIQVCLASRTTALLIPDFGYLYDPSNETAGAFVPAQILYDAFQGRYHNSAGAIVLLFIIWGSFFFGGLSITTSAARVVYALSRDEGIPFSSIWRKIHPKHKVPSNAVWLCAAICILLGLPILKVNVVFTAITSICTIGWVGGYAVPIFARIVMDEKNFKAGPFYLGRARRPVCIIAFLWICYTCSVFLLPTYYPLSWNTFNYAPVAIGVGLSSIMLWWMLDARKWFKGPVRNIDISNGKV

SEQ ID NO: 3330 - protein, 522 aa, Vitis vinifera
MAHGQPRVGVMDSGEKRLNELGYKQELRREMTLFKTLAISFSTMTLFTGITPLYGSSLLYAGPATLVWGWIVVTFFTWFVGVAMAEICSSFPTTGSLYFWAAHLAGPKWGPFASWCCAWLETIGLIAGIGTQAYAGSQTLQSIILLCTGTNKDGGYYAPRWLFLCMYMGLTIIWAVLNTFALEVIAFIDIISIWWQVIGGLAIVIMLPLVALTTQSASYVFTHFETASESTGISNVVYAAILSVLVSQYSLYGYDAAAHLTEETKGADKNGPIAILSSIGIISIFGWAYILALTFSIQDPSYLYDPTNETAGAFVPAQILYDAFHGRYHNATGAIILLFIIWGSFFFGGLSITTSAARVVYALSRDEGIPFSSIWRKVHPKHKVPSNAVWLCAVICILLGLPILKVNVVFTAITSICTIGWVGGYAVPIFARMVMAEKNFKPGPFYLGKARRPVCLVAFLWICYTCCVFLLPTFYPITWDTFNYAPVALGVGLGLIMLWWMLDARKWFKGPVRNIDIQNGKV

SEQ ID NO: 3331 - protein, 512 aa, Vitis vinifera
MDSGEKRLNELGYKQELRREMTLFKTLAISFSTMTLFTGITPLYGSSLLYAGPATLVWGWIVVTFFTWFVGVAMAEICSSFPTTGSLYFWAAHLAGPKWGPFASWCCAWLETIGLIAGIGTQAYAGSQTLQSIILLCTGTNKDGGYYAPRWLFLCMYMGLTIIWAVLNTFALEVIAFIDIISIWWQVIGGLAIVIMLPLVALTTQSASYVFTHFETASESTGISNVVYAAILSVLVSQYSLYGYDAAAHLTEETKGADKNGPIAILSSIGIISIFGWAYILALTFSIQDPSYLYDPTNETAGAFVPAQILYDAFHGRYHNATGAIILLFIIWGSFFFGGLSITTSAARVVYALSRDEGIPFSSIWRKVHPKHKVPSNAVWLCAVICILLGLPILKVNVVFTAITSICTIGWVGGYAVPIFARMVMAEKNFKPGPFYLGKARRPVCLVAFLWICYTCCVFLLPTFYPITWDTFNYAPVALGVGLGLIMLWWMLDARKWFKGPVRNIDIQNGKV

SEQ ID NO: 3332 - protein, 512 aa, Vitis vinifera
  misc_feature (447)..(447): Xaa can be any naturally occurring amino acid
MDSGEKRLNELGYKQELRREMTLFKTLAISFSTMTLFTGITPLYGSSLLYAGPATLVWGWIVVTFFTWFVGVAMAEICSSFPTTGSLYFWAAHLAGPKWGPFASWCCAWLETIGLIAGIGTQAYAGSQTLQSIILLCTGTNKDGGYYAPRWLFLCMYMGLTIIWAVLNTFALEVIAFIDIISIWWQVIGGLAIVIMLPLVALTTQSASYVFTHFETASESTGISNVVYAAILSVLVSQYSLYGYDAAAHLTEETKGADKNGPIAILSSIGIISIFGWAYILALTFSIQDPSYLYDPTNETAGAFVPAQILYDAFHGRYHNATGAIILLFIIWGSFFFGGLSITTSAARVVYALSRDEGIPFSSIWRKVHPKHKVPSNAVWLCAVICILLGLPILKVNVVFTAITSICTIGWVGGYAVPIFARMVMAEKNFKPGPFYLGKARRPVCLXAFLWICYTCCVFLLPTFYPITWDTFNYAPVALGVGLGLIMLWWMLDARKWFKGPVRNIDIQNGKV

SEQ ID NO: 3333 - protein, 527 aa, Ricinus communis
MASSRVHAGSSQTALETDSGEKRLNELGYQQELRRDMTLFKTLAITFSSMAVFTGTPLYGPSLRYAGPASMIWGWIVVTFFTWFVGVAMSEICSSFPTTGSLYFWAAHLAGPRWGPFASWCCAWLETIGVISGIGAQAYSASQALQMIILLSTGTNNGGGYFASRSVFLCMYIGFIIIWAVLNTFALEVVAFLDIISIWWQVIGGLAVVIMLPLVARPTQPASYVFTHFETSPEATGISSIPYAVIMSVLLSNYCLYGYDTAAHLTEETKGADKTGPIAILSSIGIISVFGWAYYLALTFSIKDLNYLYNENNETGGALVPAQIIYDAFHGRYGNSAGAVVFLCIIWGSFFFCGLSVTTSAGRVVYALSRDKGVPYSPIWRKIHPKYKVPRNAVWLCAAIGIILGVPILKLDVVFTAIISVSTIGWVGGYAVPIFARLIMDESNFKPGPFYLGRASRPICLVAFLWICYTCSAFLLPTVYPIQWKTFNYAPVALGVCLTLIMLWWVLDARKWFKGPVRNIDLRNGDA

SEQ ID NO: 3334 - protein, 522 aa, Vitis vinifera
MKVFNAESGALEMDSGEKRLNELGYKQELRREMTLFKTLAITFSSMAVFTGTPLYGSCLRYAGPASLIWGWVVVTFFTWFVGIAMAEICSSFPTTGSLYFWAAHLAGPRWGPFASWCCAWLEAIGLISGIGAQAFSGSQALQFIILLATGNNKGGGYFASKGVFLGMYVGLTIIWAVLNTFALQVVAFLSIISIWWQILGGLVVIIMLPLVARPTQSASYVFTHFETAPESTGISSKPYAVILSVLLSNYCLYGYDTAAHLTEETKGADRTGPIAILSSIGIISFFGWAYNLALTFSIQDPNYLYDPNNETGGGLVPAQIIYDAFHRRYQSATGAVVFMCIIWGSFFFCGLSVTASAARVVYALSRDKGIPFSPIWRKIHPKYKVPRNAVWLCAVIGMLLGLPILKLDVIFTAIISISTIGWVGGYAVPIFARLVMAEKNFKPGPFYLGRARRPVCLVAFLWICYTCSAFLLPTVYPITWDTFNYAPVALGLVLSLVMLWWVLDARKWFKGPVRNIDVNNGI

SEQ ID NO: 3335 - protein, 397 aa, Sorghum bicolor
MRRLLAHLHPHAQSLLAPLPSKPSIATKLPFLLPRRLLSDAGSPPAPSLPSPSPPATDVTNTELKKRLETYYGVDEEAELPSVAEAVLERNLTGAHSETDDDLIEELRRKPLPEVGDQDFESDFEEMHDTDEELSDLYNAREHVEKKIKNNELFNMDDTKWDAWMKEATDKGCFPNMKVCEGILEDMLYWDKLLPDEIKQKVEAKFNELGDMCERGEMEPEKAYELFKEFEDKMVAECTELIEAETPTDADELTESGSKKVELDDLPGEGPVLRWESRIVFAPSGDAYHPKNRKVKLSVTVKELGLSRHAFRRLRDVVGKRYNSGKDELTIISERFEHREENRKDCLRTLYTLIIDAIKADKLVEDARNAYVKGRLKANPQFMERLKRKTEKLMAAA

SEQ ID NO: 3336 - protein, 397 aa, Zea mays
MRRLLGHLHPHAQSLFASLPRKPSIATKLPFLLSRRLLSDAASPPAPSLPPPPPPSADVTNTELKKRLETYYGVDEEAELPSVAKAVLERNLTGAHSETDDDLIEELRSKPLPEVHDRDFESDFEEMHDTDEELNDLYNTREYVEKKIKSDEFFNMDDTKWDAMIKEATDKGHLTNMKECEEILEDMLYWDKLLPDEIKQKVETKFNELGDMCERGEMEPEQAYEMFKEFEDKMVAECTELIESKMPTDADELTESGGKKVELDDLPGEGPVLRWESRIVFVPSGDAYHPKNRKVKLSVTVKELGLSRHAFRRLREVVGKRYNSGKDELTIISERFEHREENRKDCLRTLYTLIKDAMKADKLVEDARNSYVKGRLKANPQFMERLKRKTDKLMAAA

SEQ ID NO: 3337 - protein, 389 aa, Oryza sativa Japonica Group
MRRLVTHLHRLSHRAIPSPPPSRPPTTTSLPFLLSRRLLSDDAAPPPAADVPNKELKRRLETYYGVDDEAELPSVTEAVLERKLADVHSETDDELIEELRSKPLPEVRDRDFESDFEEMHDTDEELDNLYNARQYVEKKIKSDEFFNMDDDKWNKMIKKAVDNGHLGNMNECENILEDMLHWDKLLPDEIKKKVEAKFNELGDMCEKGELEPEQAYELFKEFEDKMVSECTELMEAENPTDVDEFSKMENKSVKLDDPPGEGPVLRWESRIVFAPGGDAWHPKNRKVKLSVTVKELGLSRHAFRRLREVVGNRYNSGKDELTITSERFEHREENRKDCLRTLYAVVEDANKANKLADDARNAYVKNRLKANAQFMERLKVKTQKLRVAA

SEQ ID NO: 3338 - protein, 411 aa, Hordeum vulgare subsp. vulgare
MRRFLTHLHHHSHRLRPSPPLSCIPTTKNNLPFLVSRRLLSDDASPPAAAPLPPPPPPPAAAPPPPPPPSAIDVPNEELRRRLETYYKVEDEVELSTVAVAVLERKLADAHSETDDELIEELRNRPLPQVHDRDFEADFDEMHDTDEELTDLYNARQYVEKKMKDDESFNMNDTKWDEEIKKATEKGQLSNMKECEDILEDMLHWDKLLPDEIKQKVEAKFNELGDMCERGELEPEQAYELFKEFEDKMVSECTELMEAEPLTVDELSGADNKSVELNDPPGEGPVLRWESRIVFAPGGDAWHPKNRKVKLSVTVKELGLSRHAFRRLREVVGKRYNSGKDELTIISERFDHREENRKDCMRTLYALVEDAMKADVLANAARDAYVKGRLQANSHFMDRLKMKTQKLRQAA

SEQ ID NO: 3339 - protein, 573 aa, Sorghum bicolor
MRNYIFSIKKRVSMDYISSPELGFLKNISGRVGRKTKLVFRFLDKALLDHSINQTYGSLSSNLTFIKSIASGIIVPKSYIWPVTKDNYLLPSTSIVTEAHNAGLEIYASDFANDRIIPYNYSYDPLAEYLNFVNDGGFSVDGVLSEHPITASEAIGCFTKLNSNKTDHGEPLVISHNGASGDYPDCTDLAYHSAIDNGADIIDCPVQVTSDGVLMCMSSGNLLDTTNVQTTTYSSLVSVVPKIQPQPGIFTFNLTWADMNSNALKPKISSPASGYSLVRNPRYTNQGKFLKLSDFLAIAMDKDLSGVMIIIENAAFLINSLGIDIVDSVTTALSAAGFNNHPTKEVLIQSKDSAVLVKLKQKKTKSKLVYTLPSGIGDASNSSLKDIKKFAEAVVVDSKSVFTLSSDFIIRQNSLVQDLQSAGLALYAEVFRNEFVAQPLDFFGDETVEINYYVQSFNLSGIITDFPKTVRRYKKNTCTVLGNDMPNYMQPPQAGSLAQFLQTFKTQPPSLPPMPTLSSSSVEEPPLPTVASRSVSDGSSSGGTRTPGTPSDAHTATMSAGMLLVMVFTALLI

SEQ ID NO: 3340 - protein, 815 aa, Zea mays
MASVSLLLCLLLLVPPLAAAQQQMSSFSANNSTWSPTNSNRILVSINREFAAGFVASTSARDRYHFAVWVVGSNSTDKAFIWYAHDTASYSPYEGNDTSKLAIDAAGRLTWTAGGNNNATIWSLPPPANTTTTPAVLQLNDTGSLVYGAAWSSFAEPTNTLMPGQAMPKGGNDTTLQSVNGHYRVVNSATLQFNNSMMYANISGGSALLNLTADGKLQFSGSQLIASDQGTTNRVRRLTLDDDGNLRLYSLVPKTRKWLVVWQVVQELCTIRGTCANGRICVPVGVDSTTCVCPPGYRNATPTDPCTPKKRYSGRGDDDTFVRMDFVSFSGAANSSASDPGPLMTKLTPQNLADCERLCRSNSTCVAFGYKFGGDRTCLQFTGLVDGYWSPATEMSTYLRVVASDKDSNPFTGMTTMIETVCPVRLSLPVPPKESRTTIQNVAIITALFVVELLAGVLSFWAFLRKYSQYREMARTLGLEYLPAGGPRRFSHAELKQATKDFSNVVGRGAYGTVYRGELPDRRAVAVKQLQGVGGGEAEFWAEVTIIARMHHLNLVRMWGFCAEKEQRMLVYEYVPNGSLDKYLFAGGGGGGGSGEEDSSSEQQQQQPLLDLHTRYRIALGVARAIAYLHEECLEWVLHCDIKPENILLEDDFCPKVSDFGLSKLTSKKEKVTMSRIRGTRGYMAPEWVIHREPITAKADVYSFGMVLLEIVSGRRNYGFRQESVGSEDWYFPKWAYEKVYVERRIDDILDPRIAATYDDAASVATVERMVKTAMWCLQDRAEMRPSMGKVSKMLEGSVEITEPVKPTIFCVQDD

SEQ ID NO: 3341 - protein, 813 aa, Oryza sativa Japonica Group
MAAAVLLLLLLPALAAAQAQAQQMRTFSANDTNWSPAESNRTLVSNNGDFAAGFRPSPSSPAKFWFAVWVSANANESRPVVIWYAHNDDHSAVEGDANSVLSIDAAGKLSWSDNGNSTTLWSRNFNSTSAPLSLNDSGSLDHGAWSSFGEPTDTLMASQAIPSISNGTTTTTSITLQSQNGRFQLFNALTLQHGSSAYANITGNTALRNLTADGTLQLAGGNPSQLIASDQGSTRRLRRLTLDDDGNLRLYSLQSKKGQWRVVWQLVQELCTIRGACQGEANICVPQGADNTTCVCPPGYRPQGLGCAPKLNYSGKGNDDKFVRMDFVSFSGGADTGVSVPGKYMTSLTPQNLADCQSKCRANASCVAFGYKLGGDRTCLHYTRLVDGYWSPATEMSTYLRVVESNNDPNNFTGMTTMIDTVCPVRLALPVPPKQGRTTIRNIAIITALFAVELLAGVLSFWAFLRKYSQYREMARTLGLEYLPAGGPRRFSYAELKAATKEFSDLVGRGAYGKVYRGELPDRRAVAVKQLDGVGGGEAEFWAEVTIIARMHHLNLVRMWGFCADKEQRMLVYEYVPNGSLDKYLFAPGTGTQGDEEESNKRPLLDLHTRYRIALGVARAIAYLHEECLEWVLHCDIKPENILLEDDFCPKVSDFGLSKLTSKKEKVTMSRIRGTRGYMAPEWVIHREPITAKADVYSFGMVLLEIVSGRRNYGFRQDSVGSEDWYFPKWAFEKVYVERRIDDIIDPRIVQAEAYDDDPASLATVERMVKTAMWCLQDRADMRPSMGKVAKMLEGTVEITEPVKPTIFCVQDD

SEQ ID NO: 3342 - protein, 839 aa, Hordeum vulgare subsp. vulgare
MAMALLRLRLLPCLLLLALAGAQAQQMTSFPAGNDTRPWLPTEASRVLVSPSRGMAAGFVATEGSSPRKYRFAVWVANVSSRAGPAGKTIIWYAHGDSDGVALEADGSSSLLVNAAGALTWAGASSTNATIWSPTNAGNATAPRLTLNDTGSLVFGSWSSFDHPTDTLMPGQAIPQAANTSAGGVTTLQSASGRYRLVNSKALKYYSGPSGSIYANMTGGGALLNLSTDGELMLGGGDTNPLIASDKGAKGRLRRLTLDDDGNLRLYSLFPPRREWRVVWELVQELCTIQGTCPGNNTICVPKGADGVTCVCPPGFRNRTGGGGCEAKKSVGTGGKFVRLDFVSFSGGAAAKSSDPGPFMAIQPPSNLKVCENMCRDDPSCPAFGYKFGGDRTCRLYKTRLVDGYWSPGTEMSTFVRVAETDNDTNPFTGMTTMIDTVCPVQLALPVPPKQKATTIRNIAIITTLFAVELLAGVLSFWAFLRKYSQYREMARTLGLEYLPAGGPRRFSYAELKTATKDFTDEVGHGAYGTVFRGELPDRRAVAVKQLSGVGGGEAEFWAEVTIIARMHHLNLVRMWGFCADKDKRMLVYEYVPNGSLDKYLFSSSSSAAPSGGSGGDQGEQSSEQGQQQKVMLDLHTRYRIALGVARAIAYLHEECLEWVLHCDIKPENILLEDDFCPKVSDFGLSKLTSKKEKVTMSRIRGTRGYMAPEWVIHREPITAKADVYSFGMVLLEIVSGRRNYGFRQESVGSEDWYFPKWAYEKVYVERRIEDIMDPRILLTVDDDADSVATVERMVKTAMWCLQDRADMRPSMGKVAKMLEGTVEITDPVKPTIFCVQDD

SEQ ID NO: 3343 - protein, 839 aa, Hordeum vulgare subsp. vulgare
MAMALLRLRLLPCLLLLALAGAQAQQMTSFPAGNDTRPWLPTEASRVLVSPSRGMAAGFVATEGSSPRKYRFAVWVANVSSRAGPAGKTIIWYAHGDSDGVALEADGSSSLLVNAAGALTWAGASSTNATIWSPTNAGNATAPRLTLNDTGSLVFGSWSSFDHPTDTLMPGQAIPQAANTSAGGVTTLQSASGRYRLVNSKALKYYSGPSGSIYANMTGGGALLNLSTDGELMLGGGDTNPLIASDKGAKGRLRRLTLDDDGNLRLYSLFPPRREWRVVWELVQELCTIQGTCPGNNTICVPKGADGVTCVCPPGFRNRTGGGGCEAKKSVGTGGKFVRLDFVSFSGGAAAKSSDPGPFMAIQPPSNLKVCENMCRDDPSCPAFGYKFGGDRTCRLYKTRLVDGYWSPGTEMSTFVRVAETDNDTNPFTGVTTMIDTVCPVQLALPVPPKQKATTIRNIAIITTLFAVELLAGVLSFWAFLRKYSQYREMARTLGLEYLPAGGPRRFSYAELKTATKDFTDEVGHGAYGTVFRGELPDRRAVAVKQLSGVGGGEAEFWAEVTIIARMHHLNLVRMWGFCADKDKRMLVYEYVPNGSLDKYLFSSSSSAAPSGGSGGDQGEQSSEQGQQQKVMLDLHTRYRIALGVARAIAYLHEECLEWVLHCDIKPENILLEDDFCPKVSDFGLSKLTSKKEKVTMSRIRGTRGYMAPEWVIHREPITAKADVYSFGMVLLEIVSGRRNYGFRQESVGSEDWYFPKWAYEKVYVERRIEDIMDPRILLTVDDDADSVATVERMVKTAMWCLQDRADMRPSMGKVAKMLEGTVEITDPVKPTIFCVQDD

SEQ ID NO: 3344 - protein, 273 aa, Zea mays
MKRPRGATPSLSAMPNHQEDDGYGVLGMEADVDVDVDEEMMAFGGGGGGEKKRRLSAEQVRALERSFEVENKLEPERKARLARDLGLQPRQVAVWFQNRRARWKTKQLERDYAALRRSYDALRLDHDALRRDKDALLAEIRELKAKLGDDEDAAASFTSVKAEPAASDGPAPAGVGSSEISDSSAVLNDADPPVAEAPAPAPEVQGTLLVAPAGPVAGAAAANHGGVFFHGSFLKVEEDETGLLDDDGPCGGFFAVEQPPAMAWWNEPAEHWN

SEQ ID NO: 3345 - protein, 261 aa, Zea mays
MKRPRGASPPLAAMTNPNDDGYGVVGMEADADADADEEMMACGGGGEKKRRLSSEQVRALERSFEVENKLEPERKARLARDLGLQPRQVAVWFQNRRARWKTKQLERDYSALRQSYDALRHDHDALRRDKDALLAEIKELKAKLGDEEAAASFTSVKAEPAASDGPPPVGVGSSESDSSAVLNDADPPVAEAPVPEVRGTLLDAPGAVAANHGGVFFHGSFLKVEEDETGLLDDDEPCGGFFSVEQPPPMAWWTEPTEHWN

SEQ ID NO: 3346 - protein, 273 aa, Sorghum bicolor
MKRPRGGSPSSLAAMTNPDGDGYGVVGMEAADADADADEEMMACGGGGGEKKRRLSAEQVRALERSFEVENKLEPERKARLARDLGLQPRQVAVWFQNRRARWKTKQLERDYAALRHSYDALRHDHDALRRDKDALLAEIKELKAKLGDEEAAASFTSVKAEPAASDGPPPVGVGSSESDSSAVLNDAGPPVPEAQPVPEVQGTLLDDAPCAVVAGASAAAANHGGVFFHGSFLKVEEDETGLLDDDEPCGGFFAVEQPPPMAWWTEPTEHWN

SEQ ID NO: 3347 - protein, 277 aa, Oryza sativa Japonica Group
MKRPGGAGGGGGSPSLVTMANSSDDGYGGVGMEAEGDVEEEMMACGGGGEKKRRLSVEQVRALERSFEVENKLEPERKARLARDLGLQPRQVAVWFQNRRARWKTKQLERDYAALRHSYDSLRLDHDALRRDKDALLAEIKELKAKLGDEEAAASFTSVKEEPAASDGPPAAGFGSSDSDSSAVLNDVDAAGAGPAATDALAPEACTFLGAPPAAGAGAGAAAAASHEEVFFHGNFLKVEEDETGFLDDDEPCGGFFADDQPPPLSSWWAEPTEHWN

SEQ ID NO: 3348 - protein, 277 aa, Oryza sativa Japonica Group
MKRPGGAGGGGGSPSLVTMANSSDDGYGGVGMEAEGDVEEEMMACGGGGEKKRRLSVEQVRALERSFEVENKLEPERKARLARDLGLQPRQVAVWFQNRRARWKTKQLERDYAALRHSYDSLRLDHDALRRDKDALLAEIKELKAKLGDEEAAASFTSVKEEPAASDGPPAAGFGSSDSDSSAVLNDVDAAGAAPAATDALAPEACTFLGAPPAAGAGAGAAAAASHEEVFFHGNFLKVEEDETGFLDDDEPCGGFFADDQPPPLSSWWAEPTEHWN

SEQ ID NO: 3349 - protein, 267 aa, Hordeum vulgare subsp. vulgare
MKRPGGGNPSPLHQMASPSDMDYGVVGMEADGDAEEEMMACGGGGGGCGGGEKKRRLSAEQVRALERSFEVENKLEPERKARLARDLGLQPRQVAVWFQNRRARWKTKQLERDYNALRHSYDALRLDHDALRRDKEALLAEIKDLKGKLGDEEAAASFTSVKEEPAASDGPPPAGMGSSDSDSSGVLNDTDATGATPAEEAPAPEMGELLGGPGAAVAGHGQMFLQGNFLKVEEDETGFLDDEEPCGGFFADEPPLAWWTEPADPWK

SEQ ID NO: 3350 - protein, 361 aa, Sorghum bicolor
MFRGCGLFACARRGRGDHLRKRGELGGASSRVAPAEPEPVCVDYEAEAEDSSGGAAPARQLAWAEVETATGGFSSKVVGRGGFSTVYLASLSSSRLGAVKVHCSSERLHRAFRRELDVLLSLRHPHIVRLLGYCDERDEGVLVFEYAPNGDLHDALHGHGGVLPWARRVAVALQVATALEYLHEGRDPAPAVIHGDIKASNVLLDANMDAKLCDFGFAHVGVSATMGGGRRPSDRAVMGSPGYVDPHLLRSGVATRKSDVYSFGVLLLELLTGKEAVCRETGHRLTAAVRPQLGDGQVSDVLDQRLGGDYDAAEAAAVAEIAMQCVSDTPGLRPSMADVVRVLQEKTSAVGSRLDRKMLVS

SEQ ID NO: 3351 - protein, 354 aa, Zea mays
MFRGCGLFAGARRGRGGDLRKRGEQGGASSRVAPAEPVCVDEAEDGGAARQLAWAEVETATGGFSSRVVGRGGFSTVYLASLSSSRLGAVKVHCSSERLRRAFRRELDVLLSLRHPHVVRLLAYCDERDEGVLVFEYAPNGDLHERLHGGAGAGTLPWARRVAVAFQVASALEYLHEGRDPAVVHGDIKASNVLLDASMDAKLCDFGFAHVGVSATMGGRRPSDRAVMGSPGYVDPHLLRSGVATKASDVYSFGVLLLELLTGKEAVCRETGHRLTAAVRPKLSDGDQLPGVLDQRLGGDYDAAEAAAVAELAMQCVSDSPGLRPSMADVVRVLQEKTSAAGSRVDRKQDGVLS

SEQ ID NO: 3352 - protein, 350 aa, Zea mays
MFRGCGLFVCARRGRGDLRKRGELGGASSRVAPAEPVCVDEAEDSGATRQLAWAEVEAATGGFSSKVVGRGGFSTVYLASLPTSSRLGAVKVHCSSERLHRAFRRELDVLLSLRHPHVVRLLGYCDERDEGALVFEYAPNGDLHERLHGGAAGVQVLPWARRVAVAFQVATALEYLHEGRDPAVVHGDVKASNVLLDAGMDARLCDFGFAHVGVAATMGGRPSDRAVMGSPGYVDPHLLRSGVPTKKSDVYSFGVLLLELLTGKEAVCRETGHRLTAAVRPKLSDGQLPDVLDPRLRGDCDVAEAAAVAELAMQCVSDSPGLRPSIADVVRVLQEKTSADGSRLGGKMLS

SEQ ID NO: 3353 - protein, 361 aa, Oryza sativa Japonica Group
MFTGCGLFACVRRCDGGDVRKRGEAGAMSSRVAADPAGVEEEGSCKNVAAASARQLAWADVESVTGGFSSRVIGHGGFSTVYLASLSSSRLGAVKVHCSSERLHRAFRQELEVLLSLRHPHIVRLLGYCDERDEGVLVFEYAPNGDLHERLHCSEVAGGVASVLPWARRVAIAFQVAMALEYLHESRHPAVIHGDIKASNVLLDANMNAKLCDFGFAHVGFSATVGCRPSARAVMGSPGYVDPHLIRSGVATKKSDVYSFGVLLLELVTGKEAVCRDTGRRLTAAVGPMLSEGKVADVVDRRLGGEHDGAEAAVMAELAMQCIGDSPGLRPSMADVVRALQEKTSALASAVGSRLDRKMMF

SEQ ID NO: 3354 - protein, 351 aa, Hordeum vulgare subsp. vulgare
MFQGCGLFACVSRRGADVRKRGEAGAASSRVAAEPAAWEEQEEADGAARRMAWAEVESATGAFSSRVIGHGGFSTVYLASLSSSRLAAVKVHCSSERLHRAFRQELHVLLSLRHPHIVRLLGYCDDRDEGVLVFEYAPNGDLHQTLHGDAPPLPWSRRVAIAFQAATALEYLHEGRSPAVIHGDIKASNVLLDGNMDAKLCDFGFAHSGVSITAGRGRSSGRAIMGSPGYVDPQLLRTGVANKESDVYSFGVLLLELVTGREAVCRDTGRRLTAVVCPIVNDGNVAEVVDRRLGSQYSADEATVVAELAMRCVSEAPGLRPSMADVVHVLQEKTTALISAVGSRLDRRIMF

SEQ ID NO: 3355 - protein, 545 aa, Sorghum bicolor; identical to SEQ ID NO: 1556

SEQ ID NO: 3356 - protein, 545 aa, Zea mays
MGSTAAASVLPVSAGSGENLVLILDYGSQYTHLITRRVRQLGVLSLCVSGTAPLASLEGLRPRAVILSGGPHSVHAPGAPAFPEGFLGFAAAAGAHVLGVCYGMQLLVQSLGGAVVSGERQEYGKMDVEVTAASSALYGQAETGKRQTVWMSHGDEVVRLPEGFEVVARSVQGAVAAIENRENRFYGLQYHPEVTHSAQGMETLRRFLFDVCGIKADWKMQDVLDEEIKTIQSTVGPDEHVICALSGGVDSTVAATLVHKAIGDRLHCVFVDNGLLRYKEGERVMTTFESDLHLPVTCVDASEQFLSKLKGVEDPEKKRKIIGREFIAVFDDFAHKLEQKIGKRPEYLVQGTLYPDVIESCPPPGSGRTHSHTIKSHHNVGGLPKDMKLKLIEPLKLLFKDEVRKLGGILNVPDSFLKRHPFPGPGLAVRVLGDVTQGNALEVLRQVDEIFVQSIKDAGLYDKIWQAFAVFLPVQTVGVQGDQRTHSNAVVLRAITSEDGMTADWYYFEHAFLVDVVNKICNNVRGINRVCQDITSKPPATVEWE

SEQ ID NO: 3357 - protein, 544 aa, Oryza sativa Japonica Group
MGSASASSLPASAGFGENLVLILDFGSQYTHLITRRVRQLGVLSLCVSGTAPLASLAGLRPRAVVLSGGPHSVHASGAPTFPEGFLEFAAGAGAHVLGVCYGMQLLVQSLGGAVEAGEKQEYGKMEVEVTARSSALYGEGEVGKRQTVWMSHGDEVVRLPEGFEVVARSVQGAVAAVENREKRFYGLQYHPEVTHSPQGMETLRRFLFDVCGIKADWKMQDVLDEEIRTIQSMVGPDEHVICALSGGVDSTVAATLVHKAIGDRLHCVFVDNGLLRYNERERVMLTFESDLHLPVTCVDASEQFLSKLKGVKDPEMKRKIIGREFIAVFDDFAHKLEQKIGKRPGYLVQGTLYPDVIESCPPPGSGRTHSHTIKSHHNVGGLPKDMKLKLIEPLKLLFKDEVRKLGSILNVPESFLKRHPFPGPGLAVRVLGDVTEGNALEVLRQVDEIFVQAIKDAGLYDIIWQAFAVFLPVQTVGVQGDQRTHSNAVALRAITSEDGMTADWYYFEREFLVDVVNKICNNVRGVNRVVQDITQKPPATVEWE

SEQ ID NO: 3358 - protein, 542 aa, Hordeum vulgare subsp. vulgare
MGSASAASLPTSAGAGENLVLILDFGSQYTHLITRRVRQLGVLSLCVSGTAPLSSLAGLRPRAVVLSGGPHSVHAPGAPSFPDGFLGFAAAAGAHVLGVCYGMQLLVQTLGGAVEPGVRQEYGDMEVDITAPSSALYGEAGDRQSVWMSHGDEVVRLPEGFEVVARSVQGAIAAIEHREKRFYGLQYHPEVTHSPQGMETLRHFLFDVCGIKADWKMQDVLDEEIKTIQSMVGPDEHVICALSGGVDSTVAATLVHNAIGDRLHCVFVDNGLLRYKEQERVMSTFNSDLHLPVTCIDASEKFLSELKGVKDPETKRKIIGREFIVVFDELARMLEQKLGKRPEYLVQGTLYPDVIESCPPPGSGRTHSHTIKSHHNVGGLPKDMKLKLIEPLKLLFKDEVRKLGSILNVPESFLKRHPFPGPGLAVRVIGDVTAGNALEVLRQVDEIFIQAIKDAGLYDEIWQAFAVFLPVQTVGVQGDQRTHSHVVALRAITSEDGMTANWYDFERQFLVDVVKKICNNVRGVNRVVLDVTSKPPATVEWE

SEQ ID NO: 3359 - protein, 534 aa, Vitis vinifera
MDPENVKSNLVLILDYGSQYTHLITRRIRSLSVFSLCISGTSSLKSIVDLKPRVIILSGGPHSVHSPNSPSFPDGFVDYVESNGVFVLGICYGLQLLVQRLGGIVRVGERQEYGRMEIEVVRACGLFGSKEVGHKQTVWMSHGDEAAELPEGFEVVARSQQGAVAAVENRERRFYGLQYHPEVTHSPEGMETLRYFLFDVCRVDAGWNMEDVLNEEIKLIKGMVAPDDHVICALSGGVDSTVAATLVHKAIGDRLHCVFVDNGLLRYKERERVMETFERDLHLPVTCVDATNQFLSKLKGVVDPEMKRKIIGKEFISSFDAFGQDLEHKFGKKPVYLVQGTLYPDVIESCPPPGSGRTHSHTIKSHHNVGGLPKDMKLKLIEPLKLLFKDEVRELGRILNVPRAFLQRHPFPGPGLAVRVLGDVTEGNALDILRQVDEIFIQSIKDAGIYDSIWQAFAVFLPIRSVGVQGDQRTHSHVVALRAVTSQDGMTADWYNFEHKFLDDVARKICNSVRGVNRVVQDITSKPPSTIEWE

SEQ ID NO: 3360 - protein, 534 aa, Populus trichocarpa
MDPKAVKSDLVLILDYGSQYTHLITRRIRSLNIFSLCISGTSSLETITSHNPKVVILSGGPHSVHSANSPTFPSGFVEWAQKGGIFVLGVCYGLQLIVQRLGGQVDVGQRQEYGRMEIEVEKNLGVFGNKKVGDKQVVWMSHGDETVKLPYGFEVVARSQQGAVAAVENREMRFFGLQYHPEVTHSPEGMDTLRYFLFDVCGVSPGWNMENVLDEEIRVINDAVGPEEHVICALSGGVDSTVAATLVHKAIGDRLHCIFVDNGLLRYKERERVAETFESDLHLPVTCVDASNEFLSKLKGVVDPEMKRKIIGKEFISIFDAFAHELEQKLGKKPAYLVQGTLYPDVIESCPPPGSGRTHSHTIKSHHNVGGLPKDMKLKLIEPLKLLFKDEVRQLGRILNVPDAFLKRHPFPGPGLAVRVLGDVTEGNALDILRQVDEIFIQSIKDAGLYDSIWQAFAVFLPVRSVGVQGDQRTHSHVVALRAVTSQDGMTADWYYFEHKFLDDVARKICNSVRGVNRVVQDITSKPPSTIEWE

SEQ ID NO: 3361 - protein, 534 aa, Arabidopsis lyrata subsp. lyrata
METPTMKPDTVLILDYGSQYTHLITRRIRSLNVFSLVISGTSSLKSITSYNPRVVILSGGPHSVHALDAPSFPDGFMEWAESNGVHVLGICYGLQLIVQKLGGVVVEGESKEYGKMEIEVKGKSEIFGSGSGGEKQMVWMSHGDEAVKLPEGFEVVAQSAQGAVAALENRKKKIYGLQYHPEVTHSPKGMETLRHFLFDVCGVSADWKMEDLMEEEIKVINQTVASDEHVICALSGGVDSTVAATLVHKAIGDRLHCIFVDNGLLRYKEQERVMDTFERDLHLPVTCVDASERFLSELKGVVDPETKRKIIGKEFINIFDQFAQELEKKHGKKPAFLVQGTLYPDVIESCPPPGTDRTHSHTIKSHHNVGGLPKDMKLKLIEPLKLLFKDEVRELGRILNVPVGFLKRHPFPGPGLAVRVLGDVTQGNALEVLRQVDEIFIQSIRDAGLYDSIWQAFAVFLPVRSVGVQGDKRTHSHVVALRAVTSQDGMTADWFNFEHKFLDDVSRKICNSVQGVNRVVQDITSKPPSTIEWE

SEQ ID NO: 3362 - protein, 534 aa, Arabidopsis thaliana
METPTMKPDTVLILDYGSQYTHLITRRIRSLNVFSLVISGTSSLKSITSYNPRVVILSGGPHSVHALDAPSFPEGFIEWAESNGVSVLGICYGLQLIVQKLGGVVVEGESKEYGKMEIEVKGKSEIFGSESGGEKQMVWMSHGDEAVKLPEGFEVVAQSAQGAVAALESRKKKIYGLQYHPEVTHSPKGMETLRHFLFDVCGVSADWKMEDLMEEEIKVINKTVASDEHVICALSGGVDSTVAATLVHKAIGDRLHCIFVDNGLLRYKEQERVMDTFERDLHLPVTCVDASERFLSELKGVVDPETKRKIIGREFINIFDQFAQELEKKHGKKPAFLVQGTLYPDVIESCPPPGTDRTHSHTIKSHHNVGGLPKDMKLKLIEPLKLLFKDEVRELGRILNVPVGFLKRHPFPGPGLAVRVLGDVTQGNALEVLRQVDEIFIQSIRDAGLYDSIWQAFAVFLPVRSVGVQGDKRTHSHVVALRAVTSQDGMTADWFNFEHKFLDDVSRKICNSVQGVNRVVLDITSKPPSTIEWE

SEQ ID NO: 3363 - protein, 534 aa, Arabidopsis thaliana
METPTMKPDTVLILDYGSQYTHLITRRIRSLNVFSLVISGTSSLKSITSYNPRVVILSGGPHSVHALDAPSFPEGFIEWAESNGVSVLGICYGLQLIVQKLGGVVVEGESKEYGKMEIEVKGKSEIFGSESGGEKQMVWMSHGDEAVKLPEGFEVVAQSAQGAVAALESRKKKIYGLQYHPEVTHSPKGMETLRHFLFDVCGVSADWKMEDLMEEEIKVINKTVASDEHVICALSGGVDSTVAATLVHKAIGDRLHCIFVDNGLLRYKEQERVMDTFERDLHLPVTCVDASERFLSELKGVVDPETKRKIIGGEFINIFDQFAQELEKKHGKKPAFLVQGTLYPDVIESCPPPGTDRTHSHTIKSHHNVGGLPKDMKLKLIEPLKLLFKDEVRELGRILNVPVGFLKRHPFPGPGLAVRVLGDVTQGNALEVLRQVDEIFIQSIRDAGLYDSIWQAFAVFLPVRSVGVQGDKRTHSHVVALRAVTSQDGMTADWFNFEHKFLDDVSRKICNSVQGVNRVVLDITSKPPSTIEWE

SEQ ID NO: 3364 - protein, 225 aa, Sorghum bicolor
MNKLHVATVASLLALAAATAGAVTFDATNTASNTPGGQRFDQAVGVNYAKQVLSDASTFIWNTFNQRSPADRKPVDAITLVVEDIGGVAFTSANRIHLSTQYVGNYSGDVKTEVTGVLYHETTHVWQWDGQGKANGGLIEGIADYVRLKAGYAPSHWVKPGQGDRWDQGYDVTARFLDYCDSLKPGFVALLNAKMKGGYTDDFFAQILGKTVQQLWKDYKAKYGG

SEQ ID NO: 3365 - protein, 228 aa, Zea mays
MNKRQVAAAVAALLALLAASSTAGAVTFDATNTASDTPGGQRFDQAVGLDYAKQVLSDASTFIWNTFDQPSPADRKPVDAVTLVVEDIGGVAFTSANGIHLSAQYVGGYSGDVKTEVTGVLYHETTHVWQWDGQGQANGGLIEGIADYVRLKAGYAPGHWVQPGQGDRWDQGYDVTARFLDYCDSLKPGFVALLNAKMKDGYTDDFFAQILGKTVQQLWQDYKAKYGG

SEQ ID NO: 3366 - protein, 225 aa, Hordeum vulgare subsp. vulgare
MKLQVATVASFLLVALAATAQAVTFDASNKASGTSGGRRFEQAVGLPYSKKVLSEASAFIWKTFNQRAVGDRKPVNAVTLVVEDISGVAFTSANGIHLSAQYVASISGDVKKEVTGVLYHEATHVWQWNGQGKANGGLIEGIADYVRLKAGFAPGHWVKPGQGDRWDQGYDVTARFLDYCDSLKPGFVAQLNAKMKSGYTDDFFAQILGKNVQQLWRDYKSKFGA

SEQ ID NO: 3367 - protein, 225 aa, Hordeum vulgare
MKPQVATVAFFLLVTMAATARAVTFDASNTASGTAGGQRFDNAVGLAYSKQVLSDASTFIWNTFNQRAAADRKPVDAVTLVVEDIGGVAFASGNGIHLSAKYVGGYSGDVKKEVTGVLYHEATHVWQWNGRGTANGGLIEGIADYVRLKAGLAPGHWRPQGSGDRWDQGYDITARFLDYCDSLMPGFVAQLNAKMKSGYSDDFFAQILGKNVQQLWKDYKAKFGG

SEQ ID NO: 3368 - protein, 237 aa, Sorghum bicolor
MAPTLSSDMTTMRRAAVVVVALASLLAGVAAAGAVTFSATNAASSTAGGKRFGRDIGVAYSRRVLSDASSFCWKTFSQPNPGSRKPVSSVTLVVEDIGGVAFTSGNGIHLSAQYVGGYSGDIKTEAAGVLYHEVTHVWQWDGQGKANGGLIEGIADYVRLKAGYAPGHWGKPGQGDRWDQGYDVTARFLDYCDSLKPGFVAQLNAKMKGGYSDDFFAQILGKNVQQLWKDYKAKYGG

SEQ ID NO: 3369 - protein, 224 aa, Triticum aestivum
MKLQVATVASFVLVALAAAAQAVTFDASNKASGTSGGRRFNQAVVPYSKKVLSDASAFIWKTFNQRAVGDRKTVDAVTLVVEDISGVAFTSANGIHLSAQYVGGISGDVKKEVTGVLYHEATHVWQWNGPGQANGGLIEGIADYVRLKAGFAPGHWVKPGQGDRWDQGYDVTARFLDYCDSLKPGFVAHVNAKMKSGYTDDFFAQILGKNVQQLWKDYKAKFRG

SEQ ID NO: 3370 - protein, 218 aa, Oryza sativa Indica Group
MAAVAATAGAVTFDATNTASNTAGGQRFDREVGVDYAKQMLADASSFIWDTFEQPGDGGDRKPVDAVTLTVEDIDGVAFTSGDGIHLSARYVGGYSATGDVRAEVTGVLYHEATHVWQWDGRGGADGGLIEGIADFVRLRAGYAPPHWVQPGQGDRWDQGYDVTARFLDYCDSPAVVQGFVAQLNGKMKDGYSDDFFVQISGKTVDQLWQDYKAKYGG

SEQ ID NO: 3371 - protein, 371 aa, Zea mays; identical to SEQ ID NO: 1557

SEQ ID NO: 3372 - protein, 372 aa, Zea mays
  misc_feature (98)..(98): Xaa can be any naturally occurring amino acid
  misc_feature (115)..(116): Xaa can be any naturally occurring amino acid
MQRGVSFPGGMAEECPPAGGAELWLPDEFLDDDFFSEEEKAAVAAKSESDEEEGMDGLSRRAAGLVVGGGGDGSPAKAQVLAGSPQSILCGLHASGEXSPNGAASQVSSPPSSPXXKTPADPWDLLKEAAGQVARMRTTSGILVATNAGAHQRHPVPPLAQKLSAPADAPKAAGANLPQAQPKNSMEHRRIQIARFNALKQQQLLKHMRERELAVATAAAWGTSVAGSHRAAGYRAPAPHVLSSSAWPTLQKQQQQQRAVSPAGMRAVFVAPPGAKRECAGTGVFIPRQAGAPAEPKKRPAACAPVLLPARVVQALNLNVEDLGARPIYPGGFVLDHDALVSRSNALLASRASQQLHGASSREVNLPQEWTY

SEQ ID NO: 3373 - protein, 375 aa, Sorghum bicolor
MQSGVSFLGGMAEECPTAGGAELWLPDEFLDDDFFSEEEKAAVAAKSESDEEEGVDGLSRRVAGLVVGNGKGGGDGSPAKAEVLAGSPQSILCGLHASGEDSPNGVASQVSSPPSSPLEQAPADPWDLLSEAAGQVARLRTTSIPVPTNAAANQGDPVMAPPAKKLSAPTEAPNHAGANHSQPINNSMEQRRIQIARFNALKQQQLLKHRRERELAVATAAAWGTRVAGSHRAGAAAGYGAPASHVLSASAWPPLKKSQPQPPASPAAGMRALFLTPPGAKRECAGTGVFIPRQAGAPAEPKKKPACSPVLLPARVVQALNLNVEDLGARPIYPGGFVLDHDALVSRSNALLASRSSQLHGASSREVNLPQEWTY

SEQ ID NO: 3374 - protein, 370 aa, Zea mays
MAEECPPTGGGVELWLPDEFLDDDFFSEEEKAAVAARSENDDEEEGADGLPRRRAGLVVGNAKGQGDGSPANAEVLAGSPQSILCGLQDYGEDSPNGAASKVCSPPSSPLERPPADPWDVLKEAAGQVARLRTNSTPVPTNDAAANQGLPVTPPAKKLSAPAETAKANHSQPPNNSVEERRIQIARFNALKQRQLLKHRRDRELAVATAAAWGTSVAGSHRAAAAAAGGYGAPAPAPAPRVLSSYAWPPLQKQRQAPASPEGVRALFLAPPPGATRECAGTGVFIPRQAGAPAEPKKRPACSPVLLPVRVVQALNLNVVDLGARPIYPGGFVLDHDALVSRSNALLASRPSQLHHGASSREVNLPQEWTY

SEQ ID NO: 3375 - protein, 619 aa, Sorghum bicolor
MFDGAVAVKRMRLWEEDEVEVEEEGMEVDAEAGWPQWGAPAAAAAAGLGEPRAAAIVVADASEVDFPVIYVNAAFEAATGYRAHEVLGRNCRFLQFRDPRAQRRHPLVDPMVVSEIRRCLNEGIEFQGELLNFRKDGAPLYNRLRLIPMHGDDGYVTHVIGIQLFSDANIDLSSVSYPVYKQQSNRLSIQDLNSASHEHAPKIQSSDHCAIFQLSDEVLAHNILSRLSPRDVASIGSVCTRMHELTKNNHLRKMVCQNAWGRDVTVRLEMSTKMVGWGRLARELTTLEAASWRKFTVGGRVEPSRCNFSACAVGNRLVLFGGEGVNMQPMDDTFVLNLEAARPEWRRVKVSASPPGRWGHTLSWLNGSWLVVFGGCGQQGLLNDVFVLDLDAQQPTWREVASEAPPLPRSWHSSCTLDGSKLVVSGGCTESGVLLSDTFLLDLTKEKPAWREIPTSWSPPSRLGHTMSVYGTTKLFMFGGLAKSGSLRLRSSDAYSIDVSEDSPQWRQLATTGFPNVGPPPRLDHVAVSLPCGRIIIFGGSIAGLHSPAQLFLIDPAEEKPTWRILNVPGQPPKFAWGHSTCVVGGTRVLVLGGHTGEEWILNELHELCLASRPDEDDD

SEQ ID NO: 3376 - protein, 618 aa, Zea mays
MFDDAGAVAVKRMRLWEEDEVEVEEEGMEVDAEPGWPWGTPAAGLSRAAAIVVADAAEPDFPVIYVNAAFESATGYRAHEVLGRNCRFLQFRDPRAQRRHPLVDPMVVSEIRRCLNEGIEFHGELLNFRKDGAPLYNRLSLIPMHGDDGYVTHVIGIQLFSEANIDLSSVSYPVYKQQTNNRPSIQDLNSASHEHAPKVQSADHCGILQLSDEVLAHNILSRLSPRDVASIGSVCTRMHELTKNDHLRKMVCQNAWGRDATVKLEMSTKMVGWGRLARELTTLEAASWRKFTVGGRVEPSRCNFSACAVGNRLVLFGGEGVNMQPMDDTFVLNMEAARPEWRRVKVSASPPGRWGHTLSWLNGSWLVVFGGCGQQGLLNDVFVLDLDAQQPTWREVASEGPPLPRSWHSSCTLDGSKLVVSGGCTESGVLLSDTFLLDLTKEKPAWREIPTSWSPPSRLGHTMSVYGTTKLLMFGGLAKSGSLRLRSSDAYTMDVGEDSPQWRQLATTGFPNVGPPPRLDHVAVSLPCGRIIIFGGSIAGLHSPAQLFLVDPAEEKPTWRILNVPGKPPKFAWGHSTCVVGGTRVLVLGGHTGEEWILNELHELCLASRPDDDDDDRY

SEQ ID NO: 3377 - protein, 630 aa, Oryza sativa Japonica Group
MFDAGDRGGGGGVVAVKRMKLCEEEEEEEEGMEVDEEEEEVGWVWRPPGGLAGEDEAAAWEGRAAAIVVSDAVEVDFPVIYVNAAFEAATGYRADEVLGRNCRFLQFRDPRAQRRHPLVDPMVVSEIRRCLNEGIEFQGELLNFRKDGAPLYNRLRLIPMHGDDGFVTHVIGIQLFSEANIDLSNVSYPVYKQQSNHRPNIQEINPASHEHIPKIQSSEYCCILQLSDEVLAHNILSRLSPRDVASIGSVCTRMHELTKNDHLRKMVCQNAWGRDVTVRLEMSTKMLGWGRLARELTTLEAASWRKFTVGGRVEPSRCNFSACAVGNRLVLFGGEGVNMQPMDDTFVLNLESAKPEWRRVKVSASPPGRWGHTLSWLNGSWLVVFGGCGQQGLLNDVFVLDLDAKQPTWREVASEGPPLPRSWHSSCTLDGSKLVVSGGCTESGVLLSDTFLLDLTKEKPAWKEIPTSWSPPSRLGHTLSVFGKTKLFMFGGLAKSGSLRLRSCDAYTMDAGEDSPQWRQLATTGFPSIGPPPRLDHVAVSLPCGRIIIFGGSIAGLHSPSQLFLLDPAEEKPTWRILNVPGQPPKFAWGHSTCVVGGTRVLVLGGHTGEEWILNELHELCLASRPDEDE

SEQ ID NO: 3378 - protein, 645 aa, Oryza sativa Japonica Group
MFDAGDRGGGGGVVAVKRMKLCEEEEEEEEGMEVDEEEEEVGWVWRPPGGLAGEDEAAAWEGRAAAIVVSDAVEVDFPVIYVNAAFEAATGYRADEVLGRNWLSSGGKVYLLTRKTIRFLQFRDPRAQRRHPLVDPMVVSEIRRCLNEGIEFQGELLNFRKDGAPLYNRLRLIPMHGDDGFVTHVIGIQLFSEANIDLSNVSYPVYKQQSNHRPNIQEINPASHEHIPKIQSSEYCCILQLSDEVLAHNILSRLSPRDVASIGSVCTRMHELTKNDHLRKMVCQNAWGRDVTVRLEMSTKMLGWGRLARELTTLEAASWRKFTVGGRVEPSRCNFSACAVGNRLVLFGGEGVNMQPMDDTFVLNLESAKPEWRRVKVSASPPGRWGHTLSWLNGSWLVVFGGCGQQGLLNDVFVLDLDAKQPTWREVASEGPPLPRSWHSSCTLDGSKLVVSGGCTESGVLLSDTFLLDLTKEKPAWKEIPTSWSPPSRLGHTLSVFGKTKLFMFGGLAKSGSLRLRSCDAYTMDAGEDSPQWRQLATTGFPSIGPPPRLDHVAVSLPCGRIIIFGGSIAGLHSPSQLFLLDPAEEKPTWRILNVPGQPPKFAWGHSTCVVGGTRVLVLGGHTGEEWILNELHELCLASRPDEDE

SEQ ID NO: 3379 - protein, 626 aa, Hordeum vulgare subsp. vulgare
MFDGVDRGALVTVKRMRLCAMEEDEEEVGMEVDGEEEEEGTGGWAWGAPGLGMAGQPGEQRAAAIVVADAVEPDFPVIYVNAAFEAATGYRAHEVLGRNCRFLQFREPRAQRRHPLVDPMVVSEMRRCLSDGIEFQGELLNFRKNGAPVNNRLRLIPMHGDDGAFTHIIAIQLFSDANIDPSNISYPIYKPQSSHRLSIQDMNRASHETSPKVQCSEYCAIFQLSDEVLAHNILSRLSPRDVASVGSVCTRMHLLTKNDLLRKMVCQNAWGRDVTGRLEMSTKMLGWGRLARELTTLEAASWRKFTVGGRVEPSRCNFSACAVGNRLVLFGGEGVNMQPMSDTFVLNLDAPKPEWCRVKVSASPPGRWGHTLSWLNGSWLVVFGGCGQQGLLNDVFVLDLDAQTPAWREIASDGPPLPRSWHSSCTLDGSKLVVSGGCAESGVLLSDTFLLDLTKEKPAWKEIPTSWSSRLGHTLSVYGKTKIFMFGGLAKSGSLRLRSSDAYIMDVGEENPQWRQLATTVFPSGCPPPRLDHVTVSLPCGRIIIFGGSIAGLHSPAELFLLDPAEEKPTWRILNVPGQPPKFAWGHSTCVVGGTRVLVLGGHSGEEWILNELHELCLASRPDEDG

SEQ ID NO: 3380 - protein, 626 aa, Triticum aestivum
  misc_feature (71)..(71): Xaa can be any naturally occurring amino acid
  misc_feature (73)..(73): Xaa can be any naturally occurring amino acid
  misc_feature (75)..(75): Xaa can be any naturally occurring amino acid
  misc_feature (421)..(421): Xaa can be any naturally occurring amino acid
MFDGVDRCAVVAVKRMWLCAMEEEVEEGMEVDGEEEEEEGTGGWAWGAPGLGMAGQPGEQMAAAIVVADAXEXDXPVIYVNAAFEAATGYRAHEVLGRNCRFLQFWDPLAQRRHPLVDPMVVSEMRRCLSDGIEFQGELLNFRKNGAPLNNRLRLIPMHGDDGAFTHIIAIQLFSDANIDPSNISYPVYKPQSSHRLSFQDMNRTSHEHTPIVQCSEYCAIFNLSDEVLAYNILSRLSPRDVASVGSVCTRMHLLTKNDHLTKMVCQNAWGRDVTGRLEMSTKMLGWGRLARELTTLKAASWKKFTVGGRVEPSRCNFSACAVGNRLVLFGGEGVNMQPMSDTFVLNLEAPKPEWCRVKVSASPPGRWGHTLSWLNGSWLVVFGGCGQQGLLNDVFVLDLDAQTPAWREIASDGPPLPRSXHSSCTLDGSKLVVSGGCAESGVLLSDTFLLDLTKEKPTWKEIPTSWSSRLGHTFSVYGKTKIFMFGGLAKSGSLRLRSSDAYIMDFGEENPQWRQLATTGFPSVGPPPRLDHVTVSLPCGRIIIFGGSIAGLHSPAELFLLDPAEEKPTWRILNVPGQPPKFAWGHSTCVVGGTRILVLGGHTGEEWILNELHELCLSSRPDEDG

SEQ ID NO: 3381 - protein, 513 aa, Zea mays
MVVSEIRRCLNEGIEFHGELLNFRKDGAPLYNRLSLIPMHGDDGYVTHVIGIQLFSEANIDLSSVSYPVYKQQTNNRPSIQDLNSASHEHAPKVQSADHCGILQLSDEVLAHNILSRLSPRDVASIGSVCTRMHELTKNDHLRKMVCQNAWGRDATVKLEMSTKMVGWGRLARELTTLEAASWRKFTVGGRVEPSRCNFSACAVGNRLVLFGGEGVNMQPMDDTFVLNMEAARPEWRRVKVSASPPGRWGHTLSWLNGSWLVVFGGCGQQGLLNDVFVLDLDAQQPTWREVASEGPPLPRSWHSSCTLDGSKLVVSGGCTESGVLLSDTFLLDLTKEKPAWREIPTSWSPPSRLGHTMSVYGTTKLLMFGGLAKSGSLRLRSSDAYTMDVGEDSPQWRQLATTGFPNVGPPPRLDHVAVSLPCGRIIIFGGSIAGLHSPAQLFLVDPAEEKPTWRILNVPGKPPKFAWGHSTCVVGGTRVLVLGGHTGEEWILNELHELCLASRPDDDDDDRY

SEQ ID NO: 3382 - protein, 509 aa, Oryza sativa Indica Group
MVVSEIRRCLNEGIEFQGELLNFRKDGAPLYNRLRLIPMHGDDGFVTHVIGIQLFSEANIDLSNVSYPVYKQQSNHRPNIQEINPASHEHIPKIQSSEYCGILQLSDEVLAHNILSRLSPRDVASIGSVCTRMHELTKNDHLRKMVCQNAWGRDVTVRLEMSTKMLGWGRLARELTTLEAASWRKFTVGGRVEPSRCNFSACAVGNRLVLFGGEGVNMQPMDDTFVLNLESAKPEWRRVKVSASPPGRWGHTLSWLNGSWLVVFGGCGQQGLLNDVFVLDLDAKQPTWREVASEGPPLPRSWHSSCTLDGSKLVVSGGCTESGVLLSDTFLLDLTKEKPAWKEIPTSWSPPSRLGHTLSVFGKTKLFMFGGLAKSGSLRLRSCDAYTMDAGEDSPQWRQLATTGFPSIGPPPRLDHVAVSLPCGRIIIFGGSIAGLHSPSQLFLLDPAEEKPTWRILNVPGQPPKFAWGHSTCVVGGTRVLVLGGHTGEEWILNELHELCLASRPDEDE

SEQ ID NO: 3383 - protein, 509 aa, Oryza sativa Japonica Group
MVVSEIRRCLNEGIEFQGELLNFRKDGAPLYNRLRLIPMHGDDGFVTHVIGIQLFSEANIDLSNVSYPVYKQQSNHRPNIQEINPASHEHIPKIQSSEYCCILQLSDEVLAHNILSRLSPRDVASIGSVCTRMHELTKNDHLRKMVCQNAWGRDVTVRLEMSTKMLGWGRLARELTTLEAASWRKFTVGGRVEPSRCNFSACAVGNRLVLFGGEGVNMQPMDDTFVLNLESAKPEWRRVKVSASPPGRWGHTLSWLNGSWLVVFGGCGQQGLLNDVFVLDLDAKQPTWREVASEGPPLPRSWHSSCTLDGSKLVVSGGCTESGVLLSDTFLLDLTKEKPAWKEIPTSWSPPSRLGHTLSVFGKTKLFMFGGLAKSGSLRLRSCDAYTMDAGEDSPQWRQLATTGFPSIGPPPRLDHVAVSLPCGRIIIFGGSIAGLHSPSQLFLLDPAEEKPTWRILNVPGQPPKFAWGHSTCVVGGTRVLVLGGHTGEEWILNELHELCLASRPDEDE

SEQ ID NO: 3384 - protein, 625 aa, Glycine max
  misc_feature (604)..(604): Xaa can be any naturally occurring amino acid
MVDYYKAVTKDKEDVRNTGKRLKCMRNEEEEVYEEEESELPLKPGFFFYPTTPTSFVVSDALEPDFPIIYVNKVFEISTGYRADEALGRNCRFLQYRDPRAQRRHPLVDPVVVSEIRRCLEEGVEFQGELLNFRKDGTPLVNRLRLAPIHDDDGTVTHVIGIQLFSEANIDLNRVSYPVFKETCNQDFDKTGKYNPKSGQSLYSQHQEMCGILQLSDEVLAHNILSRLTPRDVASIGSVCRRIRQLTKNEHVRKMVCQNAWGKEVTGTLELMTKKLGWGRLTRELTTLEAVCWRKLTVGGAVEPSRCNFSACAAGNRLVLFGGEGVDMQPMDDTFVLNLDAKNPEWRRVSVKSSPPGRWGHTLSCLNGSWLVVFGGCGRQGLLNDVFVLDLDAQQPTWREVCGGTPPLPRSWHSSCTIEGSKLVVSGGCTDAGVLLSDTYLLDLTTDNPTWREIPTSWAPPSRLGHSLSVYGRTKILMFGGLAKSGHLRLRSGEAYTIDLEDEQPQWRQLEYSAFTGLASQSAVVPPPRLDHVAVSMPCGRIIIFGGSIAGLHSPSQLFLLDPSEEKPSWRILNVPGQPPKFAWGHSTCVVGGTRVLVLGGHTXEEWILNELHELCLASRQDSDL

SEQ ID NO: 3385 - protein, 238 aa, Zea mays; identical to SEQ ID NO: 1558

SEQ ID NO: 3386 - protein, 227 aa, Zea mays
MCPTKKEMSADSSGSASSWTSPEHQTVWTSPKRPAGRTKFRETRHPVFRGVRRRGSAGRWVCEVRVPGRRGCRLWLGTFDAAEAAARAHDAAMLAIAGASACLNFADSAWLLAVPASYASLAEVRRAVAEAVEDFQRREAAAGDDARSATSPAPSTSGTDDDATTDGEESSPATEDSSFQLDVFDDMSWDLYYASMAQGMLMELPSAVPAFGDDGYTNIADVPLWSY

SEQ ID NO: 3387 - protein, 240 aa, Sorghum bicolor
MCPPIKKEMSAESSASASASPSASSEHQTVWTSPPKRPAGRTKFRETRHPVFRGVRRRGNAGRWVCEVRVPGRRGCRLWLGTFDTAEAAARAHDAAMLAIAGAGACLNFADSAWLLAVPASYASLAEVRHAVAEAVEDFQRREGEGEAAAGEDDARSATSSSVPSTSSGNEDDAAATDGEESSPATEDSSPFEMDVFNDMSWDLYYASMAQGMLMELPSAVPAFGDDGYANVADVPLWSY

SEQ ID NO: 3388 - protein, 238 aa, Oryza sativa Japonica Group
MCGIKQEMSGESSGSPCSSASAERQHQTVWTAPPKRPAGRTKFRETRHPVFRGVRRRGNAGRWVCEVRVPGRRGCRLWLGTFDTAEGAARAHDAAMLAINAGGGGGGGACCLNFADSAWLLAVPRSYRTLADVRHAVAEAVEDFFRRRLADDALSATSSSSTTPSTPRTDDDEESAATDGDESSSPASDLAFELDVLSDMGWDLYYASLAQGMLMEPPSAALGDDGDAILADVPLWSY

SEQ ID NO: 3389 - protein, 238 aa, Oryza sativa
MCGIKQEMSGESSGSPCSSASAERQHQTVWTAPPKRPAGRTKFRETRHPVFRGVRRRGNAGRWVCEVRVPGRRGCRLWLGTFDTAEGAARAHDAAMLAINAGGGGGGGACCLNFADSAWLLAVPRSYRTLADVRHAVAEAVEDFFRRRLADDALSATSSSSTTPSTPRTDDEEESAATDGDESSSPASDLAFELDVLSDMGWDLYYASLAQGMLMEPPSAALGDDGDAILADVPLWSY

SEQ ID NO: 3390 - protein, 238 aa, Oryza sativa
MCGIKQEMSGESSGSPCSSASAERQHQTVWTAPPKRPAGRTKFRETRHPVFRGVRRRGNAGRWVCEVRVPGRRGCRLWLGTFDTAEGAARAHDAAMLAINAGGGGGGGACCLNFADSAWLLAVRRSYRTLADVRHAVAEAVEDFFRRRLADDALSATSSSSTTPSTPRTDDDEESAATDGDESSSPASDLAFELDVLSDMGWDLYYASLAQGMLMEPPSAALGDDGDAILADVPLWSY

SEQ ID NO: 3391 - protein, 235 aa, Oryza brachyantha
MCGIKQEVSGESPCSSPERQQTVWTAPPKRPAGRTKFRETRHPVYRGVRRRGNAGRWVCEVRVPGRRGCRLWLGTFDTAEGAARAHDAAMLAIAGDGGCCLNFADSAWRLAVPRSYRSLADVRHAVAEAVEDFLHRGRPAALLSDDADAMSATSSSSPSSPHTDDDESVATDGDESSPATDLAFELDVLSDMGWDLYYASLAQGMLMEPPSAAAAAAFGDIDTDANLADVALWSY

SEQ ID NO: 3392 - protein, 235 aa, Sorghum bicolor
MCPIKKEMTGESSSPCSSASTSSEHHQTVWTSRPKRPAGRTKFRETRHPVFRGVRRRGNAGRWVCEVRVPGRRGCRLWLGTFDTADAAARAHDAAMLAIAGAGACLNFADSAWLLAVPASYASLAEVRHAVAEAVEEFLLREVVQEDDALSATSSTPPSSPSSSDDGSTSDGGESSESDSSPAATGASPFELDVFNDMSWDLYYASLAQGMLVEPPSAVTAFMDEGFADVPLWSY

SEQ ID NO: 3393 - protein, 363 aa, Sorghum bicolor
MASEPVARAVAEEVGRWGSMKQTGVTLRYMMEFGSRPTPRNLLLSAQFLHKELPIRFARRALELESLPFGLSNKPAILKVRDWYLDSFRDIRYFPEVRSRNDELAFTQMINMVKMRHNNVVPTMALGVQQLKKELGHARKVPFEFDDQIHEFLDRFYMSRIGIRMLIGQHVALHDPQPSGVIGLINTRLSPIQVAQAACEDARAICLREYGSAPDINIYGDPNFTFPYVTHHLHLMLFELVKNSLRAVQERYMNSDEDVPPVRIIVADGEEDVTIKVSDEGGGIPRSGLPRIFTYLYSTAKNPPELDRPNVGVTMAGYGFGLPISRLYARYFGGDLQIISMEGYGTDAYLHLSRLGDSEEPLP

SEQ ID NO: 3394 - protein, 364 aa, Zea mays
MASEPVARAVAEEVGRWGSMKQTGVTLRYMMEFGSRPTQRNLLLSAQFLHKELPIRFARRALELDSLPFGLSNKPAILKVRDWYLDSFRDIRYFPEVRSRNDELAFTQMINMVKVRHNNVVPTMALGVQQLKKELGRSRKVPFEFDEIDEFLDRFYMSRIGIRMLIGQHVALHDPKPEPGVIGLINTRLSPIQVAQAACEDARSVCLREYGSAPDINIYGDPNFTFPYVTLHLHLMLFELVKNSLRAVQERYMNSDKDVPPVRIIVADGEEDVTIKVSDEGGGIPRSGLPRIFTYLYSTAKNPPELDRPNTEGVTMAGYGFGLPISRLYARYFGGDLQIISMEGYGTDAYLHLSRLGDSEEPLP

SEQ ID NO: 3395 - protein, 364 aa, Zea mays
MASEPVARAVAEEVGRWGSMKQTGVTLRYMMEFGSRPTQRNLLLSAQFLHKELPIRFARRALELDSLPFGLSNKPAILKVRDWYLDSFRDIRYFPEVRSRNDELAFTQMINMVKVRHNNVVPTMALGVQQLKKELGRSRKVPFEFDEIDEFLDRFYMSRIGIRMLIGQHVALHDPKPEPGVIGLINTRLSPIQVAQAACEDARSVCLREYGSAPDINIYGDPNFTFPYVTLHLHLMLFELVKNSLRAVQERYMNSDKDVPPVRIIVADGEEDVTIKVSDEGGGIPRSGLPRIFTYLYSTAKNPPELDRPNTERVTMAGYGFGLPISRLYARYFGGDLQIISMEGYGTDAYLHLSRLGDSEEPLP

SEQ ID NO: 3396 - protein, 363 aa, Oryza sativa Japonica Group
MASEPVARAVAEEVGRWGSMKQTGVSLRYMMEFGSRPTERNLLLSAQFLQKELPIRIARRALELESLPFGLSRKPAILKVRDWYLDSFRDIRYFPEVRNRNDELAFTQMIKMIKVRHNNVVPTMALGVQQLKNEQYRTRKIPTAFDEIHEFLDRFYMSRIGIRMLIGQHVALHDPDPEPGVIGLINTELSPIQVAQAASEDARSICLREYGSAPEIDIYGDPTFTFPYVSSHLHLMLFELVKNSLRAVQERYMNSDKDVPPVRIIVADGAEDVTIKVSDEGGGIPRSGLPRIFTYLYSTAKNPPDMDCPSEGVTMAGYGYGLPISRLYARYFGGDLQIISMEGYGTDAYLHLSRLGDSEEPLP

SEQ ID NO: 3397 - protein, 373 aa, Oryza sativa Indica Group
MASEPVARAVAEEVGRWGSMKQTGVSLRYMMEFGSRPTERNLLLSAQFLQKELPIRIARRALELESLPFGLSRKPAILKVILGEWSVNKVRDWYLDSFRDIRYFPEVRNRNDELAFTQMIKMIKVRHNNVVPTMALGVQQLKNEQYRTRKIPTAFDEIHEFLDRFYMSRIGIRMLIGQHVALHDPDPEPGVIGLINTELSPIQVAQAASEDARSICLREYGSAPEIDIYGDPTFTFPYVSSHLHLMLFELVKNSLRAVQERYMNSDKDVPPVRIIVADGAEDVTIKVSDEGGGIPRSGLPRIFTYLYSTAKNPPDMDCPSEGVTMAGYGYGLPISRLYARYFGGDLQIISMEGYGTDAYLHLSRLGDSEEPLP

SEQ ID NO: 3398 - protein, 373 aa, Oryza sativa Japonica Group
MASEPVARAVAEEVGRLGSMKQTGVSLRYMMEFGSRPTERNLLLSAQFLQKELPIRIARRALELESLPFGLSRKPAILKVILGEWSVNKVRDWYLDSFRDIRYFPEVRNRNDELAFTQMIKMIKVRHNNVVPTMALGVQQLKNEQYRTRKIPTAFDEIHEFLDRFYMSRIGIRMLIGQHVALHDPDPEPGVIGLINTELSPIQVAQAASEDARSICLREYGSAPEIDIYGDPTFTFPYVSSHLHLMLFELVKNSLRAVQERYMNSDKDVPPVRIIVADGAEDVTIKVSDEGGGIPRSGLPRIFTYLYSTAKNPPDMDCPSEGVTMAGYGYGLPISRLYARYFGGDLQIISMEGYGTDAYLHLSRLGDSEEPLP

SEQ ID NO: 3399 - protein, 364 aa, Hordeum vulgare subsp. vulgare
MMASEPVARAVAEEVGRWGSMKQTGVSLRYMMEFGSVPTDRNLLLSAQFLHKELPIRIARRALDLESLPFGLSAKPAILKVRDWYLDSFRDIRYFPEVRNRDDELAFTQMIKMIKVRHNNVVPTMALGVQQLKNEQFSSRKLPPGFDEIHEFLDRFYMSRIGIRMLIGQHVALHDPEPEPGVIGLINTKLSPIQVAQIASEDARSICMREYGSAPDINIYGDRNFTFPYVASHLHLMLFELVKNSLRAVQERYMDSDKDVPPVRIIVADGTEDVTIKVSDEGGGIRRSGLPRIFTYLYSTAKNLPDIEGPSEGVTMAGYGFGLPVSRLYAQYFGGDLQIISMEGYGTDAYLHLSRLGDSEEPLP

SEQ ID NO: 3400 - protein, 363 aa, Sorghum bicolor
MASEPVARAVAEEVARWGAMRQTGVSLRYMMEFGARPTERTLLLAAQFLHKELPIRIARRALDLDSLPFGLSTKPAILKVRDWYVESFRDIRSFPEVRNREDELAFTQMIKMIRVRHTNVVPAIALGVQQMKKDLGGPKAFPPGIQEIHQFLDRFYMSRIGIRMLIGQHVALHDPDPEPGVIGLINTKMSPMTVARIASEDARAICMREYGSSPDVDIYGDPGFTFPYVTPHLHLMIFELVKNSLRAVQERYMDSDKLAPPVRIIVADGAEDVTIKISDEGGGIPRSGLSRIFTYLYSTAENPPDLDGHNEGVTMAGYGYGIPISRLYARYFGGDLQIISMEGYGTDAYLHLSRLGDSEEPLP

SEQ ID NO: 3401 - protein, 363 aa, Zea mays
MASEPVARAVAEEVARWGAMRQTGVSLRYMMEFGARPTERTLLLAAQFLHKELPIRIARRALDLDSLPFGLSTKPAILKVKDWYVESFREIRSFPEVRNQKDELAFTQMIKMIRVRHTNVVPAIALGVQQLKKDLGGPKAFPPGIHEIHQFLDRFYMSRIGIRMLIGQHVALHDPDPEPGVIGLINTKMSPMTVARIASEDARAICMREYGSSPDVDIYGDPGFTFPYVTPHLHLMIFELVKNSLRAVQERYMDSDKLAPPVRIIVADGAEDVTIKISDEGGGIPRSGLSRIFTYLYSTAENPPDLDGHNEGVTMAGYGYGIPISRLYARYFGGDLQIISMEGYGTDAYLHLSRLGDSEEPLP

SEQ ID NO: 3402 - protein, 363 aa, Zea mays
MALEPVARAVAEEVARWGAMRQTGVSLRYMMEFGVRPTERTLLLAAQFLHKELPIRIARRALDLDSLPFGLSTKPAILKVRDWYVESFRDIRSFPEVKNQEDELAFTQMIKMIKVRHTNVVPAVALGVQQLKKDLGGPKAFPPGIHEIHQFLDRFYMSRIGIRMLIGQHVALHDPDPEPGVIGLINTKMSPMTVARIASEDARAICMREYGSSPNVDIYGDPGFTFPYVTPHLHLMIFELVKNSLRAVQERYMDSDKLAPPVRIIVADGAEDVTIKITDEGGGIPRSGLSRIFTYLYSTAENPPDLDVHNEGVTMAGYGYGIPISRLYARYFGGDLQIISMEGYGTDAYLHLSRLGDSEEPLT

SEQ ID NO: 3403 - protein, 507 aa, Sorghum bicolor
MGFQVAAVAPSPCARSSSASSSPSTSSRPLPAFLGGGGGGGGCAGLARSRSPLNWGTGVMVRRPRLARTPARCALSASLDGMGGGDAEFMKRIEELAAAVGVQPAGAAGCGGWPASVERSASNVGLPLSLRMLKRKKQQQQQVVAARHSRWDEELLGMGSAGESVGRAFSSMVLIVRELQSFALQQMRDALLCDDLQGVLARVQGEMHASFVWLFQHIFAGTPALMVSLMLLLANFTVQSMGHSVAAAAATIPPTPPAVALVNTQRAEPSRPPRFDAAASVKTFSVGRTASVGGNSGGGGKAPPVAGATGDGRSDESLYRLSRVAPQQPSSAPPGAEVAAQDAANADEQAIWEMMLAEASKMQASARAEELSDSDVLRSLVAPVEAELETEDHAEHTLTQQRYEQAVAAEPNNSLILANFAQFLYLVQNDHDRAEHYFERAVRAEPADSEALSWYATFLWKARNDLAGAEDTYQEAIAADPGNAHHAAAYAHFLWNTGGEETCYPLD

SEQ ID NO: 3404 - protein, 499 aa, Zea mays
  misc_feature (97)..(97): Xaa can be any naturally occurring amino acid
MGFQVAAVAPPPCARSSSALSSPSTSSRPFLGGGGGCAGLARSRAPVNWGTGVMVWRPRPARTPARCALSASLDGMGGGDAEFMKRIEEIAAAAGVXPAGASGCGWPASVELSASNVGLPLSLRMLKRKKQQQQAQLQAVARPSRWDEGLLGSAGESVGRAFSSMVLIVRELQSFALQQMRDALLCDDLQGVLARVQGEMHASFVWLFQHIFAGTPAFMVSLMLLLANFTVQSMGHSVAAAAATIPPTPPAVALVNAQRAEPSRPRFDAASVKTFSVDRMASVGGDSGGGGKTPPVAGATGDGRSDESLYRLSRVSPQQPSAPPVAEVAQDAADADEQAIWEMMLAEALKASPRTEELSDPDVLRSLVAPVEAELETEDHAEHTLTQQRYEQAVAAEPNNPLILANFAQFLYLVQNDHDRAEHYFERAVRAEPADSEALSRYATFLWKARNDLAGAEDAYQEAIAADPGNAHHAAAYAHFLWNTGACTGTGAEATRQDA

SEQ ID NO: 3405 - protein, 484 aa, Oryza sativa Japonica Group
MGLQVAAVAPSPCARSSASSSPPSTSSSRPALGGAGLARSRAPVNWGAGVMARRRGLRQPARCALSASLDGVGGGDAEFLRRIEELAAAVGVQPTGCGWPASVERSASSAGMPLSLRMLKRKKQQQQLVARQTRWDERLLGSAGDSVGRAFSSMVLIVRELQSFALQQMREAMLGDDLQSVLARVHGEMHASFVWLFQHIFAGTPALMVSLMLLLANFTVHSMGHSVAAAAAIPPAPPTSAAVAVVDTQHADPSLPRFDAASVKTFSIGRAASVGGSSGGGGKVRPVAGATGDDRWDESLARLSGVAPQQPAPPAGTGAGMAVDEQAIWERMVAEASNMQENARAEELSDPDVLGNLVAPVEAEIETEGHAEYTRTEQRYELAVSEEPNNPLILANFAQFLYLVQNDHDRAEQYFERAVRAEPADAEALSRYATFLWKARNDLAAAEDTYQEAIAADPGNAHHAAAYAHFLWNTGGEDTCFPLD

SEQ ID NO: 3406 - protein, 484 aa, Oryza sativa Indica Group
MGLQVAAVAPSPCARSSASSSPPSTSSSRPALGGAGLARSRAPVNWGAGVMARRRGLRQPARCALSASLDGVGGGDAEFLRRIEELAAAVGVQPTGCGWPASVERSASSAGMPLSLRMLKRKKQQQQLVARQTRWDERLLGSAGDSVGRAFSSMVLIVRELQSFALQQMREAMLGDDLQSVLARVHGEMHASFVWLFQHIFAGTPALMVSLMLLLANFTVHSMGHSVAAAAAIPPAPPTSAAVAVVDTQHADPSLPRFDAASVKTFSIGRAASVGGSSGGGGKVRPVAGATGDDRWDESLARLSGVAPQQPAPPAGTGAGMAEDEQAIWERMVAEASNMQENARAEELSDPDVLGNLVAPVEAEIETEGHAEYTRTEQRYELAVSEEPNNPLILANFAQFLYLVQNDHDRAEQYFERAVRAEPADAEVLSRYATFLWKARNDLAAAEDTYQEAIAADPGNAHHAAAYAHFLWNTGGEDTCFPLD

SEQ ID NO: 3407 - protein, 478 aa, Hordeum vulgare subsp. vulgare
MGFQVAAVVPSPCAPSSAPSTSSRSPFLGGGCGMPVRSSAPGGLVARRRGEGRPARCALSASIDGTGGGDLEFLRRIEELAASAGARTAGCGWPPSLERSASAVGLPLSLRMLKRKKKQQQVAPRSRWDERLLLGSAGESVGRAFSSMVLIVQELQSFALQQMQEALLCDDLQGVLARAHGEMHASFVWLFQHIFAATPALMLSLMLLLANFSVHSMSHSVAAAAVSPTLPAAAAATLVDAQHNEPSNPRFDAVSVKTFSSGRTASVGGGSGGGGDVRPVAGASSDDRWDESRYSLNRVAPQQLAPLAGMGADAAAVDEQAIWDRMAAEASSMQADARVDELTDPSVLGSLVAPVEAEIETEDVGEYARTEQRYELAVSEEPNNSLILANFAQFLYLTRKDHKRAEHYFERAVQAEPTDAEALSRYATFLWKARDDVEAAEETYQEAIAADPGNAHYAAAYAHFLWNTGGEDTCFPLD

SEQ ID NO: 3408 - protein, 770 aa, Oryza sativa Japonica Group
MAAAAILPELAAQVVIPVAAAVGIAFAVLQWALVSKVKLTAEPRRGEAGGAAGGKSGPSDYLIEEEEGLNDHNVVSKCAEIQTAISEGATSFLFTEYKYVGLFMSIFAVLIFLFLGSVEGFSTKSQPCHYSKDKTCKPALANAIFSTIAFVLGAVTSLVSGFLGMKIATYANARTTLEARKGVGKAFITAFRSGAVMGFLLAASGLLVLYIAINLFGIYYGDDWEGLFEAITGYGLGGSSMALFGRVGGGIYTKAADVGADLVGKVERNIPEDDPRNPAVIADNVGDNVGDIAGMGSDLFGSYAESSCAALVVASISSFGINHEFTPMVYPLLVSSVGIIACLITTLFATDFFEIKAVSEIEPALKKQLIISTAFMTVGIALVSWLGLPYTFTIFNFGAQKTVQSWQLFLCVAVGLWAGLIIGFVTEYYTSNAYSPVQDVADSCRTGAATNVIFGLALGYKSVIIPIFAIAFSIFLSFSLAAMYGVAVAALGMLSTIATGLAIDAYGPISDNAGGIAEMAGMSHRIRERTDALDAAGNTTAAIGKGFAIGSAALVSLALFGAFVSRAAISTVDVLTPKVFIGLIVGAMLPYWFSAMTMKSVGSAALKMVEEVRRQFNTIPGLMEGTTKPDYATCVKISTDASIKEMIPPGALVMLTPLIVGILFGVETLSGVLAGALVSGVQIAISASNTGGAWDNAKKYIEAGASGHARTLGPKGSDPHKAAVIGDTIGDPLKDTSGPSLNILIKLMAVESLVFAPFFATHGGILFKLF

SEQ ID NO: 3409 - protein, 770 aa, Oryza sativa Japonica Group
MAAAAILPELAAQVVIPVAAAVGIAFAVLQWALVSKVKLTAEPRRGEAGGAAGGKSGPSDYLIEEEEGLNDHNVVSKCAEIQTAISEGATSFLFTEYKYVGLFMSIFAVLIFLFLGSVEGFSTKSQPCHYSKDKTCKPALANAIFSTIAFVLGAVTSLVSGFLGMKIATYANARTTLEARKGVGKAFITAFRSGAVMGFLLAASGLLVLYIAINLFGIYYGDDWEGLFEAITGYGLGGSSMALFGRVGGGIYTKAADVGADLVGKVERNIPEDDPRNPAVIADNVGDNVGDIAGMGSDLFGSYAESSCAALVVASISSFGINHEFTPMVYPLLVSSVGIIACLITTLFATDFFEIKAVSEIEPALKKQLIISTAFMTVGIALVSWLGLPYTFTIFNFGAQKTVQSWQLFLCVAVGLWAGLIIGFVTEYYTSNAYSPVQDVADSCRTGAATNVIFGLALGYKSVIIPIFAIAFSIFLSFSLAAMYGVAVAALGMLSTIATGLAIDAYGPISDNAGGIAEMAGMSHRIRERTDALDAAGNTTAAIGKGFAIGSAALVSLALFGAFVSRAAISTVDVLTPKVFIGLIVGAMLPYWFSAMTMKSVGSAALKMVEEVRRQFNTIPGLMEGTTKPDYATCVKISTDASIKEMIPPGALVMLTPLIVGILFGVETLSGVLAGALVSGVQIAISASNTGGAWDNAKKYIEAGASEHARTLGPKGSDPHKAAVIGDTIGDPLKDTSGPSLNILIKLMAVESLVFAPFFATHGGILFKLF

SEQ ID NO: 3410 - protein, 766 aa, Sorghum bicolor
MAAAAILPELATQVLIPVAAAVGIAFAVVQWVLVSKVRLTPERRADGGAAKSGPSDYLIEEEEGLNDHNVVVKCAEIQNAISEGATSFLFTEYKYVGLFMGIFAILIFLFLGSVEGFSTKSQPCHYSKGKTCKPALANAIFSTIAFVLGAVTSLVSGFLGMKIATYANARTTLEARKGVGKAFITAFRSGAVMGFLLAASGLLVLYIAINLFGIYYGDDWEGLFEAITGYGLGGSSMALFGRVGGGIYTKAADVGADLVGKVERNIPEDDPRNPAVIADNVGDNVGDIAGMGSDLFGSYAESSCAALVVASISSFGINHEFTPMVYPLLVSSVGIIACLVTTLFATDFFEIKAVSEIEPALKKQLIISTVVMTIGIALISWLGLPYTFTIFNFGEQKTVQSWQLFLCVAVGLWAGLVIGFVTEYYTSNAYSPVQDVADSCRTGAATNVIFGLALGYKSVIIPIFAIAFSIFLSFSLAAMYGVAVAALGMLSTIATGLAIDAYGPISDNAGGIAEMAGMSHRIRERTDALDSAGNTTAAIGKGFAIGSAALVSLALFGAFVSRAAISTVDVLTPKVFIGLIVGAMLPYWFSAMTMKSVGSAALKMVEEVRRQFNTIPGLMEGTTKPDYATCVKISTDASIKEMIPPGALVMLTPLIVGILFGVETLSGVLAGALVSGVQIAISASNTGGAWDNAKKYIEAGASEHARTLGPKGSDPHKAAVIGDTIGDPLKDTSGPSLNILIKLMAVESLVFAPFFAAHGGILFKWL

SEQ ID NO: 3411 - protein, 766 aa, Zea mays
MAAAAIPSKLATQVLIPVAAAVGIAFAVVQWVLVSKVRVTPERRADGGAVKSGPSDYLIEEEEGLNDHNVVVKCAEIQTAISEGATSFLFTEYKYVGLFMGIFAILIFLFLGSVEGFSTKSQPCHYIKDQTCKPALANAIFSTIAFVLGAVTSLVSGFLGMKIATYANARTTLEARKGVGKAFITAFRAGAVMGFLLAASGLLVLYIAINLFGIYYGDDWEGLFEAITGYGLGGSSMALFGRVGGGIYTKAADVGADLVGKVERNIPEDDPRNPAVIADNVGDNVGDIAGMGSDLFGSYAESSCAALVVASISSFGINHEFTPMVYPLLVSSVGIIACLITTLFATDFFEIKAVDEIEPALKKQLIISTIVMTIGIALISWLGLPYTFTIFNFGVQKTVQSWQLFLCVAVGLWAGLVIGFVTEYYTSNAYSPVQDVADSCRTGAATNVIFGLALGYKSVIIPIFAIAFSIFLSFSLAAMYGVAVAALGMLSTIATGLAIDAYGPISDNAGGIAEMAGMSHRIRERTDALDAAGNTTAAIGKGFAIGSAALVSLALFGAFVSRAAISTVDVLTPKVFIGLIVGAMLPYWFSAMTMKSVGSAALKMVEEVRRQFNNIPGLMEGTTKPDYATCVKISTDASIKEMIPPGALVMLTPLIVGILFGVETLSGVLAGALVSGVQIAISASNTGGAWDNAKKYIEAGVSEHARTLGPKGSDPHKAAVIGDTIGDPLKDTSGPSLNILIKLMAVESLVFAPFFAAHGGILFKWL

SEQ ID NO: 3412 - protein, 771 aa, Hordeum vulgare subsp. vulgare
MVAAAILPELATQLVVPVAAAVGIAFAVLQWVLVSKVKVAPEPRAEGGSASAAGGKDGATEYLIEEEEGLNDHNVVLKCAEIQTAISEGATSFLFTEYKYAGGFMTIFAVLIFVFLGSIEGFSTKSQPCHYSVGKTCKPALANAAFSTIAFVLGAVTSLVSGFLGMKIATYANARTTLEARKGVGKAFITAFRSGAVMGFLLAASGLFVLYVAINLFGLYYGDDWEGLFEAITGYGLGGSSMALFGRVGGGIYTKAADVGADLVGKVERNIPEDDPRNPAVIADNVGDNVGDIAGMGSDLFGSYAESSCAALVVASISSFGINHEFTPMMYPLLISSVGIIACLITTLFATDFFEVKEVDQIEPALKRQLIISTAVMTIGIALVSWLGLPYTFTIFNFGAQKTVHSWQLFLCVAVGLWAGLVIGFITEYYTSNAYSPVQDVADSCRTGAATNVIFGLALGYKSVIIPIFAIAFSIFLSFSLAAMYGVAVAALGMLSTIATGLAIDAYGPISDNAGGIAEMAGMSHRIRERTDALDAAGNTTAAIGKGFAIGSAALVSLALFGAFVSRAGITTVDVLTPNVFIGLLVGAMLPYWFSAMTMKSVGSAALKMVEEVRRQFNTIPGLMEGTAKPDYATCVKISTDASIKEMIPPGALVMLTPLIVGTLFGVETLSGVLAGALVSGVQIAISASNTGGAWDNAKKYIEAGASEHAKSLGPKGSDCHKAAVIGDTIGDPLKDTSGPSLNILIKLMAVESLVFAPFFATYGGILFKIL

SEQ ID NO: 3413 - protein, 782 aa, Oryza sativa Japonica Group
MNPSARISQVAMAAILPDLATQVLVPAAAVVGIAFAVVQWVLVSKVKMTAERRGGEGSPGAAAGKDGGAASEYLIEEEEGLNEHNVVEKCSEIQHAISEGATSFLFTEYKYVGLFMGIFAVLIFLFLGSVEGFSTKSQPCHYSKDRMCKPALANAIFSTVAFVLGAVTSLVSGFLGMKIATYANARTTLEARKGVGKAFITAFRSGAVMGFLLAASGLVVLYIAINLFGIYYGDDWEGLFEAITGYGLGGSSMALFGRVGGGIYTKAADVGADLVGKVERNIPEDDPRNPAVIADNVGDNVGDIAGMGSDLFGSYAESSCAALVVASISSFGINHEFTPMLYPLLISSVGIIACLITTLFATDFFEIKAVDEIEPALKKQLIISTVVMTVGIALVSWLGLPYSFTIFNFGAQKTVYNWQLFLCVAVGLWAGLIIGFVTEYYTSNAYSPVQDVADSCRTGAATNVIFGLALGYKSVIIPIFAIAFSIFLSFSLAAMYGVAVAALGMLSTIATGLAIDAYGPISDNAGGIAEMAGMSHRIRERTDALDAAGNTTAAIGKGFAIGSAALVSLALFGAFVSRAAISTVDVLTPKVFIGLIVGAMLPYWFSAMTMKSVGSAALKMVEEVRRQFNSIPGLMEGTTKPDYATCVKISTDASIKEMIPPGALVMLSPLIVGIFFGVETLSGLLAGALVSGVQIAISASNTGGAWDNAKKYIEAGASEHARTLGPKGSDCHKAAVIGDTIGDPLKDTSGPSLNILIKLMAVESLVFAPFFATHGGILFKWF

SEQ ID NO: 3414 - protein, 771 aa, Oryza sativa (japonica cultivar-group)
MAAILPDLATQVLVPAAAVVGIAFAVVQWVLVSKVKMTAERRGGEGSPGAAAGKDGGAASEYLIEEEEGLNEHNVVEKCSEIQHAISEGATSFLFTEYKYVGLFMGIFAVLIFLFLGSVEGFSTKSQPCHYSKDRMCKPALANAIFSTVAFVLGAVTSLVSGFLGMKIATYANARTTLEARKGVGKAFITAFRSGAVMGFLLAASGLVVLYIAINLFGIYYGDDWEGLFEAITGYGLGGSSMALFGRVGGGIYTKAADVGADLVGKVERNIPEDDPRNPAVIADNVGDNVGDIAGMGSDLFGSYAESSCAALVVASISSFGINHEFTPMLYPLLISSVGIIACLITTLFATDFFEIKAVDEIEPALKKQLIISTVVMTVGIALVSWLGLPYSFTIFNFGAQKTVYNWQLFLCVAVGLWAGLIIGFVTEYYTSNAYSPVQDVADSCRTGAATNVIFGLALGYKSVIIPIFAIAFSIFLSFSLAAMYGVAVAALGMLSTIATGLAIDAYGPISDNAGGIAEMAGMSHRIRERTDALDAAGNTTAAIGKGFAIGSAALVSLALFGAFVSRAAISTVDVLTPKVFIGLIVGAMLPYWFSAMTMKSVGSAALKMVEEVRRQFNSIPGLMEGTTKPDYATCVKISTDASIKEMIPPGALVMLSPLIVGIFFGVETLSGLLAGALVSGVQIAISASNTGGAWDNAKKYIEAGASEHARTLGPKGSDCHKAAVIGDTIGDPLKDTSGPSLNILIKLMAVESLVFAPFFATHGGILFKWF

SEQ ID NO: 3415 - protein, 771 aa, Oryza sativa
MAAILPDLATQVLVPAAAVVGIAFAVVQWVLVSKVKMTAERRGGEGSPGAAAGKDGGAASEYLIEEEEGLNEHNVVEKCSEIQHAISEGATSFLFTEYKYVGLFMGIFAVLIFLFLGSVEGFSTKSQPCHYSKDRMCKPALANAIFSTVAFVLGAVTSLVSGFLGMKIATYANARTTLEARKGVGKAFITAFRSGAVMGFLLAASGLVVLYIAINLFGIYYGDDWEGLFEAITGYGLGGSSMALFGRVGGGIYTKAADVGADLVGKVERNIPEDDPRNPAVIADNVGDNVGDIAGMGSDLFGSYAESSCAALVVASISSFGINHEFTPMLYPLLISSVGIIACLITTLFATDFFEIKAVDEIEPALKKQLIISTVVMTVGIVLVSWLGLPYSFTIFNFGAQKTVYNWQLFLCVAVGLWAGLIIGFVTEYYTSNAYSPVQDVADSCRTGAATNVIFGLALGYKSVIIPIFAIAFSIFLSFSLAAMYGVAVAALGMLSTIATGLAIDAYGPISDNAGGIAEMAGMSHRIRERTDALDAAGNTTAAIGKGFAIGSAALVSLALFGAFVSRAAISTVDVLTPKVFIGLIVGAMLPYWFSAMTMKSVGSAALKMVEEVRRQFNSIPGLMEGTTKPDYATCVKISTDASIKEMIPPGALVMLSPLIVGIFFGVETLSGLLAGALVSGVQIAISASNTGGAWDNAKKYIEAGASEHARTLGPKGSDCHKAAVIGDTIGDPLKDTSGPSLNILIKLMAVESLVFAPFFATHGGILFKWF

SEQ ID NO: 3416 - protein, 771 aa, Hordeum vulgare subsp. vulgare
MVAAAILPELATQLVVPVAAAVGIAFAVLQWVLVSKVKVAPEPRAEGGSASAVGAKDGATEYLIEEEEGLNDHNVVLKCAEIQTAISEGQTSFLFTEYKYAGGFMTIFAVLIFVFLGSIEGFSTKSQPCHYSVGKTCKPALANAAFSTIAFVLGAVTSLVSGFLGMKIATYANARTTLEARKGVGKAFITAFRSGAVMGFLLAASGLFVLYVAINLFGLYYGDDWEGLFEAITGYGLGGSSMALFGRVGGGIYTKAADVGADLVGKVERNIPEDDPRNPAVIADNVGDNVGDIAGMGSDLFGSYAESSCAALVVASISSFGINHEFTPMMYPLLISSVGIIACLITTLFATDFFEVKEVDQIEPALKRQLIISTAVMTIGIALVSWLGLPYTFTIFNFGAQKTVHSWQLFLCVAVGLWAGLVIGFITEYYTSNAYSPVQDVADSCRTGAATNVIFGLALGYKSVIIPIFAIAFSIFLSFSLAAMYGVAVAALGMLSTIATGLAIDAYGPISDNAGGIAEMAGMSHRIRERTDALDAAGNTTAAIGKGFAIGSAALVSLALFGAFVSRAGITTVDVLTPNVFIGLLVGAMLPYWFSAMTMKSVGSAALKMVEEVRRQFNTIPGLMEGTAKPDYATCVKISTDASIKEMIPPGALVMLTPLIVGTLFGVETLSGVLAGALVSGVQIAISASNTGGAWDNAKKYIEAGASEHAKSLGPKGSDCHKAAVIGDTIGDPLKDTSGPSLNILIKLMAVESLVFAPFFATYGGILFKIL

SEQ ID NO: 3417 - protein, 771 aa, Oryza sativa Japonica Group
MAAILPDLATQVLVPAAAVVGIAFAVVQWVLVSKVKMTAERRGGEGSPGAAAGKDGGAASEYLIEEEEGLNGQNVVEKCSEIQHAISEGATSFLFTEYKYVGLFMGIFAVLIFLFLGSVEGFSTKSQPCHYSKDRMCKPALANAIFSTVAFVLGAVTSLVSGFLGMKIATYANARTTLEARKGVGKAFITAFRSGAVMGFLLAASGLVVLYIAINLFGIYYGDDWEGLFEAITGYGLGGSSMALFGRVGGGIYTKAADVGADLVGKVERNIPEDDPRNPAVIADNVGDNVGDIAGMGSDLFGSYAESSCAALVVASISSFGINHEFTPMLYPLLISSVGIIACLITTLFATDFFEIKAVDEIEPALKKQLIISTVVMTVGIALVSWLGLPYSFTIFNFGAQKTVYNWQLFLCVAVGLWAGLIIGFVTEYYTSNAYSPVQDVADSCRTGAATNVIFGLALGYKSVIIPIFAIAFSIFLSFSLAAMYGVAVAALGMLSTIATGLAIDAYGPISDNAGGIAEMAGMSHRIRERTDALDAAGNTTAAIGKGFAIGSAALVSLALFGAFVSRAAISTVDVLTPKVFIGLIVGAMLPYWFSAMTMKSVGSAALKMVEEVRRQFNSIPGLMEGTTKPDYATCVKISTDASIKEMIPPGALVMLSPLIVGIFFGVETLSGLLAGALVSGVQIAISASNTGGAWDNAKKYIEAGASEHARTLGPKGSDCHKAAVIGDTIGDPLKDTSGPSLNILIKLMAVESLVFAPFFATHGGILFKWF

SEQ ID NO: 3418 - protein, 337 aa, Zea mays
MPPLPAADDLLILEFIASNRRIPHAVFNSFIASQSPPSAFSRTSQRLRKALVLRALDAALYTVGASCSSGLLLHKARKVLADPDAAACFPHQIPFTENEENDEARAAVADLKRLLDLEWANLPPSTLELVAGDGSHQTGAAADHTMRTKLRLFAKREILAKPVQVGSASHQSIRTQVADNASNANKADGARRDEAHPSNSNVNYEADSDRESMVGHQNASVKGAEGQLSEKSVFTSKKRVLVERIPKWDSSDDDQPVRKRKLDPFERKPYPSPTCAYKIRKKWSKIEIETLLEGVDKYGIGNWKDIKLAYPGVFEERSTVDLKDKFRNLGKRHHESS

SEQ ID NO: 3419 - protein, 340 aa, Sorghum bicolor
MPPLTAADDFLILEFIAGNRRIPYAVFDSLLACLSSPSAIHRTSQRLRQALVLRALDAALLTEGASSLVLYKARKVLADPDAAACFPHQISVTDNEENDEARAAAAVADLKRLLDLEWANLPPSTLERAADRIAGDGAHQTWAAADHIKRTKLRLLGESTEHEILSKAVQDGSASHQPIVTEVADNVSNANDADGAQRDDEAHSSNENSEADRGQEGMAGHQNASVKGGEGQVSEKSVPASKRCSLMERNPNWDSSDDDQPVRKRKLHRFERTSTCAHKIRKKWSEIEEKTLLEGVKKYGKGNWKDIKLAYPDVFEERSTVDLKDKFRNLERHHHESASA

SEQ ID NO: 3420 - protein, 481 aa, Sorghum bicolor
MAADRRTVVVYDAEAGDDHERQGTVWTATSHIVAAVVGSGVLALAWTVAQLGWVVGPLVLVGFSCVTYYTSALLADCYRYPDPVDGAVNREYIDAVRCYLDRKNVVLCGCAQYVNLWGTLVGYTITASASMIAVKRVNCFHRDGYGAAGCNPSGSTYMVVFGVFQLLLSQLPSLHNIAWLSVVAVATSFGYSFISLGLCAAKWASHDGGHDIRGTLAGAAVDVPRDKAFNVLLALGNIAFSYTFADVLIEIQDTLRAPPAENTTMKKASFYGLGMTTVFYLALGCTGYAAFGDDAPGNILTGFAFYEPFWLVDVANVCVIVHLIGAYQVFAQPIFARLESCVACRWPDAKFINATYYVRVPPCLRSSSSSAPASSTTVAVAPLKLVLRTIVIMFTTLVAMLLPFFNAVLGLIGALGFWPLSVYFPVSMHMARLKIRRGELRWWLLQAMSFVCLLISIAASIGSVQDIVHNLKAAAPFKPGN

SEQ ID NO: 3421 - protein, 483 aa, Zea mays
MADSRRSVVYDAEGGDDHERQGTAWTATSHIVAAVVGSGVLALAWTVAQLGWVVGPLVLVGFSCVTYYTSALLADCYRYPDPVHGAVNREYIDAVRCYLDRKNVVLCGCAQYVNLWGTLVGYTITASASMIAIKRVNCFHRDGYGAAGCNPSGSTYMVVFGLFQLLLSQLPSLHNIAWLSVVAVATSLGYSFISLGLCSAKWASHGGHVRGTLSGAAAVAGRVDDDKQAAFNVLLALGNIAFSYTFADVLIEIQDTLRSPPAENRTMKRASAYGLAITTVFYLALGCTGYAAFGDHAPGNILTGFAFYEPFWLVDAANVCVVLHLVGAYQVFAQPIFARLESCVACRWPDAKLINATYYVRVPPCLLLLRTSSSSPPPTLPVAPLKLVLRTIVIMFTTLVAMLLPFFNAVLGLIGALGFWPLSVYFPVSMHMARLNIRRGEIRWWMLQAMSFVCLLISVAASIGSVHDIVHNLKAAAPFNTAN

SEQ ID NO: 3422 - protein, 484 aa, Zea mays
MADSRRSVVYDAEGGDDHERQGTAWTATSHIVAAVVGSGVLALAWTVAQLGWVVGPLVLVGFSCVTYYTSALLADCYRYPDPVHGAVNREYIDAVRCYLDRKNVVLCGCAQYVNLWGTLVGYTITASASMIAIKRVNCFHRDGYGAAGCNPSGSTYMVVFGLFQLLLSQLPSLHNIAWLSVVAVATSLGYSFISLGLCSAKWASHGGHVRGTLAGAAAVAGRADDDKQAAFNVLLALGNIAFSYTFADVLIEIQDTLRSPPAENRTMKRASAYGLAITTVFYLALGCTGYAAFGDHAPGNILTGFAFYEPFWLVDAANVCVVLHLVGAYQVFAQPIFARLESCVACRWPDAKLINATYYVRVPPCLLLLRTSSSSSPPPTLAVAPLKLVLRTIVIMFTTLVAMLVPFFNAVLGLIGALGFWPLSVYFPVSMHMARLNIRRGEIRWWMLQAMSFVCLLISVAASIGSVHDIVHNLKAAAPFNTAN

SEQ ID NO: 3423 - protein, 468 aa, Oryza sativa Japonica Group
MDRRAVVYDAEAVDDHERQGTVWTATSHIVAAVVGSGVLALAWTVAQLGWVVGPLVLVGFSCVTYYTSTLLANCYRYPDPVTGTANREYIDAVRCYLGPKNVMLCGCAQYVNLWGTLVGYTITASASMIAVKRVNCFHREGYGAGDCGASGSTYMVVFGVFQLLLSQLPSLHNIAWLSVVAVATSFGYSFISLGLCAAKWASHGGAVRGTLAGADLDFPRDKAFNVLLALGNIAFSYTFADVLIEIQDTLRSPPAENKTMKRASFYGLSMTTVFYLLLGCTGYAAFGNDAPGNILTGFAFYEPFWLVDIANICVIVHLIGAYQVFAQPIFARLESYVACQWPDAKFINATYYVRVPGRWWPAATVAVAPLKLVLRTIIIMFTTLVAMLLPFFNAVLGLIGALGFWPLSVYFPVSMHVARLGIRRGEPRWWSLQAMSFVCLLISIAASIGSVQDIVHNLKAAAPFKTVN

SEQ ID NO: 3424 - protein, 324 aa, Oryza sativa Indica Group
MVNGLYGSSADWKFAAEQFVKRLPGKVFVHRSQCNHSKLTYDGVDLMGERLAEEVRQVVQRRSNLQKISFVAHSLGGLVTRYAIGKLYDPSINEEASLDKENFSNELRTSDGGKIAGLEPINFIAVATPHLGSRWNKQLPFLFGVPLLERTAAVTAHFIVGRTGKHLFLTDSDDGKPPLLLRMAEDCDDGKFMSALRSFKRRVAYANVTYDHIVGWRTSSIRRQHELPKLQLTPSDKKYPHIIHVDKGNSEHHQQEESVEASLTDSMEEVMIHGLTQVPWERVDVCFHKSWLRYNAHHNIQVRIHPVNSDGEDVIYHLIDNFLV

SEQ ID NO: 3425 - protein, 390 aa, Zea mays
MGFLLVRKPRPRDEKPDLANWMRCFLSQRLSQPAAAAEETANAEGKAAGRREEEEGGGDDADHLVVMVNGLYGSSADWKFAAEQFVKRLPGKVYVHRSQSNYSKLTYDGVDLMGERLAEEVRQVVQRRRNLRKISFVAHSLGGLVTRYAIGKLYEPAMDETSSCDIDKPSDEQNVRDVGKIAGLEPINFITSATPHLGSRLNKQLPFLFGVPLLEKTAAGTAHFIVGRTGKHLFLTDNDDGKPPLLLRMVEDCDDGKFMSALRCFKRRVAYANVTYDHIVGWRTSSLRRQHELPKLKLTANDEKYPHIINVDKGNLEDHRQEGSVEDSLADSYEEVMIRGLTQVAWERVDVCFHKSWLRYNAHNNIQVRIHPINSDGEDVIYHMIDNFVV

SEQ ID NO: 3426 - protein, 278 aa, Zea mays
MGERLAEEVRQVVQRRRNLRKISFVAHSLGGLVTRYAIGKLYEPAMDETSSCDIDKPSDEQNVRDVGKIAGLEPINFITSATSHLGSRLNKQLPFLFGVPLLEKTAAGTAHFIVGRTGKHLFLTDNDDGKPPLLLRMVEDCDDGKFMSALRCFKRRVAYANVTYDHIVGWRTSSLRRQHELPKLKLTANDEKYPHIINVDKGNLEGHRQEGSVEDSLADSYEEVMIRGLTQVAWERVDVCFHKSWLRYNAHNNIQVRIHPINSDGEDVIYHMIDNFVV

SEQ ID NO: 3427 - protein, 380 aa, Sorghum bicolor; identical to SEQ ID NO: 1559

SEQ ID NO: 3428 - protein, 167 aa, Sorghum bicolor
MHSFGHRANAVATFGVTILAAMCFAASFSDNFNTPTPTASVKILNINWFQKEANGNDEVSMTLNISADLSSLFTWNTKQVFVFVAAEYETPQNALNQVSLWDGIIPAKEHAKFLIHTTNKYRFIDQGSNLKGKEFNLTMHWHIMPKTGKMFADKIVMTGYRLPEQYR

SEQ ID NO: 3429 - protein, 167 aa, Oryza sativa Indica Group
MHSFGHRANAVATFAVTILAAMCFAASFSDHFNSPSPTASVKILNINWFQKEANGNDEVSMTLNISADLSSLFTWNTKQVFVFVAAEYETPQNALNQVSLWDGIIPSKEHAKFLIHTTNKYRFIDQGSNLKGKDFNLTMHWHIMPKTGKMFADKIVMTGYRLPEQYR

SEQ ID NO: 3430 - protein, 167 aa, Zea mays
MHSFGHRANAVATFAVTILAAMCFAASFSDNFNTLTPTASVKILNINWFQKEANGNDEVSMTLNISADLSSLFTWNTKQVFVFVAAEYETRQNALNQVSLWDGIIPAKEHAKFLIHTTNKYRFIDQGSNLKGKEFNLTMHWHIMPKTGKMFADKIVMTGYQLPEQYR

SEQ ID NO: 3431 - protein, 167 aa, Hordeum vulgare subsp. vulgare
MHSFGHRANAVATFALTILAAMCFAASFSDSFNSPTPTASVKILNINWFQKEANANDEVSMTLNISADLSSLFTWNTKQVFVFVAAEYETPQNALNQVSLWDGIIPAKEHAKFLIHTTNKYRFIDQGSNLKAKDFNLTMHWHIMPKTGKMFADKIVMTGYQLPEQYR

SEQ ID NO: 3432 - protein, 167 aa, Glycine max
MHSFGYRANALLTSAVTILALMCAMASVSDNFNTPTPSAQVQVLNINWFQKQPNGNDEVSMTMNISADLQSLFTWNTKQVFVFLAAEYETPKNSLNQISLWDGIIPSKEHAKFWIHTSNKYRFIDQGSNLRGKEYNLTMHWHVMPKTGKMFADKIVMPGYRLPQEYR

SEQ ID NO: 3433 - protein, 167 aa, Glycine max
MHSFDYRANALLTFAVTILALRCAMASVSDNFNTPTPSAQVQVLNINWFQKQPNGNDEVSMTLNISADLQSLFTWNTKQVFVFLAAEYETPKNSLNQISLWDGIIPSKEHAKFWIHTSNKYRFIDQGSNLQGKEYNLTMHWHVMPKSGKMFADKIVMPGYRLPEEYR

SEQ ID NO: 3434 - protein, 167 aa, Vitis vinifera
MHSFGYRANSLLTFAVTILAVMCAMASFSDNLNTPSPSSQVEVLSINWFQRQPNGNDEVSMTLNISANLQSMFTWNTKQVFVFLAAEYATPKNSLNQVSLWDGIIPSKEHAKFWIHTTNKYRFTDQGSNLRGKEFNLTLHWHVMPKTGKMFADKIIMTGFRLPEEYR

SEQ ID NO: 3435 - protein, 149 aa, Zea mays
MHSFGHRANAVATFAVTILAAMCFAASFSDNFNTLTPTASVKILNINWFQKEANGNDEVSMTLNISADLSSLFTWNTKQVSLWDGIIPAKEHAKFLIHTTNKYRFIDQGSNLKGKEFNLTMHWHIMPKTGKMFADKIVMTGYQLPEQYR

SEQ ID NO: 3436 - protein, 167 aa, Ricinus communis
MHSFGYRANALLTFAVTILALMCAMASLSDNLNSPAPSAQIQILNINWFQKQPHGNDEVSLTMNITADLQSLFTWNTKQVFVFVAAEYATPKNALNQVSLWDAIIPAKEHAKFWVQTANKYRFVDQGSNLRGKEFNLTLHWHVMPKTGKMFADKLVMPGYRLPEEYR

SEQ ID NO: 3437 - protein, 380 aa, Sorghum bicolor; identical to SEQ ID NO: 1559

SEQ ID NO: 3438 - protein, 452 aa, Zea mays
MPASSRFYTSATCSLASASASSRSPPRRRRVSLTGQSPSTPLTRHSRNQSSSRWPHPDLGLDMGFLLVRKPRPRDEKPDLVNWMRCFLSQRLSQPAAAAEETANAEGKAAGRREEEEGGGDDADHLVVMVNGLYGSSADWKFAAEQFVKRLPGKVYVHRSQSNYSKLTYDGVDLMGERLAEEVRQVVQRRRNLRKISFVAHSLGGLVTRYAIGKLYEPAMDETSSCDIDKPSDEQNVRDVGKIAGLEPINFITSATPHLGSRLNKQLPFLFGVPLLEKTAAGTAHFIVGRTGKHLFLTDNDDGKPPLLLRMVEDCDDGKFMSALRCFKRRVAYANVTYDHIVGWRTSSLRRQHELPKLKLTANDEKYPHIINVDKGNLEDHRQEGSVEDSLADSYEEVMIRGLTQVAWERVDVCFHKSWLRYNAHNNIQVRIHPINSDGEDVIYHMIDNFVV

SEQ ID NO: 3439 - protein, 432 aa, Oryza sativa Japonica Group
MPASSRLNPSSATCSLAAASASTSASPRRRGRGRRPASAMGQAPSSPPGPGRSRSRGISRWPPPPPPLQGLRLDLGLLLGRKARTRSGGGKLDLANWLRCFVAPPLPQPSEAEASAEGRDAGNREEEEAGNEEADHLVVMVNGLYGSSADWKFAAEQFVKRLPGKVFVHRSQCNHSKLTYDGVDLMGERLAEEVRQVVQRRSNLQKISFVAHSLGGLVTRYAIGKLYDPSINEEASLDKENFSNELRTSDGGKIAGLEPINFIAVATPHLGSRWNKQLPFLFGVPLLERTAAVTAHFIVGRTGKHLFLTDSDDGKPPLLLRMAEDCDDGKFMSALRSFKRRVAYANLQLTPSDKKYPHIIHVDKGNSEHHQQEESVEASLTDSMEEVMIHGLTQVPWERVDVCFHKSWLRYNAHHNIQILFVKHNLRLITDQ

SEQ ID NO: 3440 - protein, 446 aa, Hordeum vulgare subsp. vulgare
RLCAYATCSLAASPVPTPPSPPRRRRRRRRLASSMGQSASSPSGGGRGDSRWPALRLDLGLPPGRKQRPAGERLNLGDRLRRALSRPSPQNTEVEIEAEEEGRDAGNRVEVEAGGAEADHLVVMVNGLYGSSADWKFAAEQFVKKLPGKVYVHRSECNHSRLTYDGVDIMGERLAEEVHQVVQRKGNLRKVSIVAHSLGGLISRYAIGRLYEESTSEEPCLNMEKHSDKENISRGGKIAGLEPMNFIASATPHLGSRWNKQLPFLFGVPLLEQTAAETAHLIVGRTGKHLFLSDRDDGKPPLLVRMVEDCDDGKFMSALRSFKRRVAYANITYDHIVGWSTSSIRRQHELPKLELTAIDEKYPHVIHVDTANSEGPQQEDPVETSLTDSLEEEMIRGLKQVTWERVDVCFHESRLKYNAHYNIQVRTPMNLEGEDVIYHMIDNFLV

SEQ ID NO: 3441 - protein, 167 aa, Zea mays; identical to SEQ ID NO: 1560

SEQ ID NO: 3442 - protein, 149 aa, Zea mays; identical to SEQ ID NO: 3435

SEQ ID NO: 3443 - protein, 167 aa, Cucumis melo subsp. melo
MHSFGFRANALLTFAATILAVICALASFSDTLNSPSPTAQVQVLSINWFQNQPNGNDEVSMTLNISADLQSLFTWNTKQVFVFLAAEYETPSNSLNQISLWDGIVPSKEIAKFQIHTSNKYRFVDQGSNLRGKEFNLTLHWHVMPKTGKMFADKLVMSGYRLPQEYR

SEQ ID NO: 3444 - protein, 654 aa, Sorghum bicolor; identical to SEQ ID NO: 1561

SEQ ID NO: 3445 - protein, 654 aa, Zea mays
MALVPSGGAGACKDEAALGLPWSEMFRSASRRRPKQESDDAPPKKPALKTAGAKEMKAKPSSVGTGAGAGADIAGLSLEPDARLALYIAMAHAGLATALLVLYGLYLLLADFLRPLQWALLCSVPLRETQRALVAFWEPPLRGGLSAALLALPLAVLRSSTATLADARAALLRRPLPSSPAFPRLLRWLVSFFFFLILFERLGAATALLLLVFALAFFAASPKLKRAASSRISGRPPSSRGLLLTGGILRHLKTLVALGLMLGMIAGFITGSIFFSYKIGLEGKDAVMSLKSHVEKSNYSEKIGLKKWMDDNDIPGLVDQYSAKIYDTLWEQVDQLAVQYNLTDFTSGFRHFLISQSVDPKSKALISSRPHPYSMKLQSIATRVRNREWVEIYWELDSFFRELLITREDLVIKAKELALQGTEIAKRLLSSSTSVLGGSANLMLSITLRIVSGAAEVVNFLSQLMVFLWVLYYLITVEGGGATEQIIDLLPVSKQVKDRCVEVMDHAISSVLLATAKIAIFQGGLTWLLFKFFKVHFVYTSTVLGFISALVPILPFWLSSIFATGQLLMEGRYVLALVVTVIHLMLMDYGTTTILEDIPGYNGYLTGLSIIGGMTLFPNALEGAILGPLIMTVVIALKNLYTEFVLADGEETSS

SEQ ID NO: 3446 - protein, 648 aa, Oryza sativa Japonica Group
MALVAKGEPNGGACKDGEVMDLPWSEMFRSASLRLPKQEEPTTTKKPQGKGKASAAEEDIGGLSLEPDARLALYIAMAHAGLATALLVVYGLYRLLADFLRPLQWALLCSIPLRETQRALVAFWEPPLRGGLGAAVLALPLAAVRSCGATLADARAALLRRPLPPSPSFPRLLRWLASSFLFLLLLDRLGTATALVLLALSLAFFAASPKPSSFLSRAASSRIAGRTPSSRCLFLTGGILRHLKTLVAVGLMLGMILGFLSGSVFFSYKIGLEGKDAVMSLKSHVENGNYSEKIGLKKWLDDNDIPGLVDQYSAKLYDTVWEQIDQLAVQYNLTDFTSGFRHFLISQSVDPSGAKGKELITSGPHPYSMKLQVIAKHVKNREWMDIYRELDSFFRELLITREDLVVKAKGLALQGAEIAKSLLSSSTSVLGGSANLMLSITLHIVSGAAEVLNFVSQLMVFLWVLYYLITVEGGGATEQVIDLLPLSKQVKDRCVEVIDHAISSVLLATAKIAIFQGCLTWLLFKLFKVHFVYTSTVFAIISALLPILPPWLSSIFAAGQLLMEGRYVLAIVVTVVHLIIMDYGTTVIQEDIPGYNGYLTGLSIIGGMALFPNALEGAILGPLIMTVVMALKNLYTEFVLADSEETSS

SEQ ID NO: 3447 - protein, 644 aa, Hordeum vulgare subsp. vulgare
MALVPSGGDQAAACKATIPWSEMFRSASVRRPKQAEDPPKPAPTPPGKKAAPPTAEAEGLSLEPDARLALYIAMAHAGLATALLVLYGLYLLLADFLRPLQWALLCSVPLRETQHALVAFWEPPLRGGFSATVLALPLAALRSCAATLADARAALLRRPLPPSPSFPRLLRWLVSSFFFLLLLERLGTTAALVLLAVSLAFYAASPKPSSFIPRAASSRISGRTPSSRGLLLTGGILRHLRTLVAVGLMLGMIAGFLGGSVFFSYKIGLEGKDAVMSLKSHVENGNYSEKIGLKKLLDDNDIPGLVEQYSGKLVETVWEQVDQLAVQYNLTDFTSGFKHFLITQSVPSGAKSKELITSGPHPYSLKLQAITLRVKKREWLEIYKELDSFFRELLITREDLVVKAKDLALQGTEIAKSLLSSGTSVLGGSASLMLSIALRILSGAAEVLNFVSQLMVFMWVLYYLITVEGGGATEQVIDLLPVSKQVKERCVEVIDHAISSVLLATAKIAIFQGCLTWLLLKFFKVHFVYTATVFTIISALFPILPAWLSSIFAAAQLLTEGRYVLAVMVTVIHLVIMDYGTTVIQEDIPGYNGYLTGLSIIGGMTLFPNALEGAILGPLIMTVVIALKNLYTEFVLADTEEMSS

SEQ ID NO: 3448 - protein, 539 aa, Sorghum bicolor
MSAAHLLRHSRKLRSLQNAVGCENFSLVRHFSSGSGSVIAKENGVGKRTRGTRFSQHNQPAKELETFSLGVNGSCTWRRASNSLTPSAASRLNGSFSCGQVVSARPFSSSADLPPHQEIGMPSLSPTMTEGNIAKWLKKEGDKVSPGEVLCEVETDKATVEMECMEEGYLAKIVQGDGAKEIKVGEVIAITVEEEGDIEKFKDYKPSSSAEPVAPAESKAQPEPSQPKVEEKKLTQAPEAKAPKIEDASQSGDRIFASPLARKLAEDNNVPLSSVKGTGPDGRILKADIEDYLAKGGTREAFAAPGLGYIDIPNAQIRKVTANRLLQSKQTIPHYYLTVDARVDKLVKLRGELNPLQDAAGGKKISINDLVIKAAALALRKVPQCNSSWMNDFIRQYHNVNINVAVQTEHGLFVPVIRDADKKGLGTIAEEVKQLAQKARDNSLKPADYEGGTFTVSNLGGPFGIKQFCAIINPPQSAILAIGSAEKRVIPGSADGQYEFGSFMSATLSCDHRVIDGAIGAEFLKAFKGYIENPTSMLL

SEQ ID NO: 3449 - protein, 539 aa, Zea mays
MSATQLLRRSRKLQSLQNAVGCENFFLFRHFSSGSGSFIAKENGVGKRTRGTRFSQQYQPTKELEPFSLGVNGNCTWRRASNSLTPSAASWLNGSFSCGQVVSARTFSSSADLPPHQEIGMPSLSPTMTEGNIAKWLKKEGDKVSPGEVLCEVETDKATVEMECMEEGYLAKIIHGDGAKEIKVGEVIAITVEEEGDIEKFKDYKPSSSAEPVAPAESKAQPEPSQPKVEEKKLTQAPEVKAPKIEEASQSGDRIFASPLARKLAEDNNVPLSSVKGTGPDGRIFKADIEDYLAKGGLREAFAAPGLGYVDIPNAQIRKVTANRLLASKQTIPHYYLTVDARVDKLVKLRGELNPLQDASGGKKISINDLVIKAAALALRKVPQCNSSWMNDFIRQYHNVNINVAVQTEHGLFVPVIRDADKKGLGTIAEEVKQLAQKARDNSLKPADYEGGTFTVSNLGGPFGIKQFCAIINPPQSAILAIGSAEKRVIPGSADGLYEFGSFMSATLSCDHRVIDGAIGAEFLKAFKGYIENPTSMLL

SEQ ID NO: 3450 - protein, 542 aa, Zea mays
MSAAQLLRHSRKLRSLQNPVGCENFSFVRHFSSGSGSFIARENGIGKRTRGTRFSQHNQPAKQLETFSAGVNGSCTWRIASNSLTPSAASWLSGSFSCGQVVSARPFSSSADLPPHQEIGMPSLSPTMTEGNIAKWLKKEGDKVSPGEVLCEVETDKATVEMECMEEGYLAKIIHGDGAKEIKVGEVIAITVEEEGDIEKLKDYKPSSSAEPVAPAEPKAEPEPSQPKAEEKKPTQAPEAKTPKIEEASQSGDRIFASPLARKLAEDNNVPLSSVKGTGPDGRILKADIEDYLASVAKGGLRESFADPGLGYVDIPNAQIRKVTANRLLASKQTIPHYYLTVDARVDKLVQLRGELNPLQDASGGKKISINDLVIKAAALALRKVPQCNSSWMNDFIRQYHNVNINVAVQTEHGLFVPVIRDADKKGLGAIAEEVKQLAQKARDNSLKPADYEGGTFTVSNLGGPFGIKQFCAIINPPQSAILAIGSAEKRVIPGSADGQFEFGSFMSATLSCDHRVIDGAIGAEFLKAFKGYIENPTSMLL

SEQ ID NO: 3451 - protein, 541 aa, Oryza sativa Japonica Group
MSAAHLLRHSRKLRSLHNALDCERSGLVRYFSTASGSFPTKGNGAEKRIGGARFPQRKQPGKELETSKLSLGLNGSYTCRRSPNNFIPNTITGLNGSLSCGQIASARSFSSSADLPPHQEIGMPSLSPTMTEGNIARWLKKEGDKVSPGEVLCEVETDKATVEMECMEEGYLAKIIHGDGSKEIKVGEIIAVTVEEEGDIKKFKDYKPSTLAAPVAPSELKAQSEPTEPKVEEREPSKASELKAPRTEEPSRSGDRIFSSPLARKLAEDNNVPLSSVKGTGPDGRILKADIEDYLAKGCRKEALAAPGLSYTDVPNAQIRKVTANRLLSSKQTIPHYYLTVDTRVDNLIKLRGELNPLQESSGGKKISINDLVIKAAALALRKVPQCNSSWMNDFIRQYHNVNINVAVQTEHGLFVPVIRDADKKGLGMIAEEVKQLAQRARDNSLKPDDYEGGTFTISNLGGPFGIKQFCAIINPPQSAILAIGSAERRVIPGSANGQYEFGSFMSATMSCDHRVIDGAIGAEFLKAFKGYIENPTSMLL

SEQ ID NO: 3452 - protein, 541 aa, Oryza sativa Indica Group
MSAAHLLRHSRKLRSLHNALDCERSGLVRYFSTASGSFPTKGNGAEKRIGGARFPQRKQPGKELETSKLSLGLNGSYTCRRSPNNFIPNTITGLNGSLSCGQIASARSFSSSADLPPHQEIGMPSLSPTMTEGNIARWLKKEGDKVSPGEVLCEVETDKATVEMECMEEGYLAKIIHGDGSKEIKVGEIIAVTVEEEGDIKKFKDYKPSTLAAPVAPSELKAQSELTEPKVEEREPSKASEPKAPRTEEPSRSGDRIFSSPLARKLAEDNNVPLSNVKGTGPDGRILKADIEDYLAKGCRKEALAAPGLSYTDVPNAQIRKVTANRLLSSKQTIPHYYLTVDTRVDNLIKLRGELNPLQESSGGKKISINDLVIKAAALALRKVPQCNSSWMNDFIRQYHNVNINVAVQTEHGLFVPVIRDADKKGLGMIAEEVKQLAQRARDNSLKPDDYEGGTFTISNLGGPFGIKQFCAIINPPQSAILAIGSAERRVIPGSANGQYEFGSFMSATMSCDHRVIDGAIGAEFLKAFKGYIENPTSMLL

SEQ ID NO: 3453 - protein, 548 aa, Oryza sativa Japonica Group
MSAAHLLRHSRKLRTLRDALDYDRSALVRYFSAASASFPTKGGAAAGVEKRIGGARFPQCKQPGKELETFKVSLGGLNGRYACRRAPNNCIPTTITGLNGSLSCGQVSSARSFSSSADLPPHQEIGMPSLSPTMTEGNIARWLKKEGDKVSPGEVLCEVETDKATVEMECMEEGYLAKIIHGDGAKEIKVGEIIAVTVEEEGDLEKFKDYKPSTSAAPAAPSEPKAQPEPAEPKVKETEPSRTPEPKAPKTEEASQPGGRIFSSPLARKLAEDNNVPLSSVMGTGPDGRILKADIEDYLASVAKGGKREALAAPGLSYTDVPNTQIRKVTANRLLSSKQTIPHYYLTVDARVDNLIKLRGELNPLQESSGGKKISINDLVIKAAALALRKVPQCNSSWMSDFIRQYHNVNINVAVQTEHGLFVPVIRDADKKGLGTIAEEVKQVAQRARDNSLKPEDYEGGTFTISNLGGPFGIKQFCAIINPPQSAILAIGTAEKRVIPGSVDGQYEFGSFMSATMSCDHRVIDGAIGAEFLKAFKGYIENPNSMLL

SEQ ID NO: 3454 - protein, 548 aa, Oryza sativa Indica Group
MSAAHLLRHSRKLRTLRDALDYDRSALVRYFSAASASFPTTGGAAAGVEKRIGGARFPQCKQPGKELETFKVSLGGLNGRYACRRAPNNCIPTTITGLNGSLSCGQVSSARSFSSSADLPPHQEIGMPSLSPTMTEGNIARWLKKEGDKVSPGEVLCEVETDKATVEMECMEESYLAKIIHGDGAKEIKVGEIIAVTVEEEGDLERFKDYKPSTSAVPAAPSELKAQPEPAEPKVKETEPSRIPEPKAPKTEEASQPGGRIFSSPLARKLAEDNNVPLSSVMGTGPDGRILKADIEDYLASVAKGGKREALAAPGLSYTDVPNTQIRKVTANRLLSSKQTIPHYYLTVDARVDKLIKLRGELNPLQESSGGKKISINDLVIKAAALALRKVPQCNSSWMSDFIRQYHNVNINVAVQTEHGLFVPVIRDADKKGLGTIAEEVKQVAQRARDNSLKPEDYEGGTFTISNLGGPFGIKQFCAIINPPQSAILAIGTAEKRVIPGSVDGQYEFGSFMSATMSCDHRVIDGAIGAEFLKAFKGYIENPNSMLL

SEQ ID NO: 3455 - protein, 550 aa, Oryza sativa Japonica Group
MALLLRHSPKLRRAHAILGCERGTVVRHFSSSTCSSLVKEDTVSSSNLHPEYAKKIGGSDFSHDRQSGKELQNFKVSPQEASRASNFMRASKYGMPITANGVHSLFSCGQVVPSRCFSSGADLPPHQEIGMPSLSPTMTEGNIARWVKKEGDKVSPGEVLCEVETDKATVEMECMEEGYLAKIIHGDGAKEIKVGEIIAVTVEEEEDIGKFKDYKAPSSAESAAPAESKPQSEPTEPKKEKEQPKAPEPKATKTEESFLSEDRTFSSPIARKLAEDNNVPLSSIKGTGPDGRILKADIEDYLASVAKGAKKETAAAPGLGYVDLPNTQIRKVTANRLLHSKQTIPHYYLTVDTRVDKLIKLRSELNPLQDTSGGKKISINDLVIKAAALALRNVPECNSSWMNDFIRQYHNVNINVAVQTEDGLFVPVIRDADKKGLATIADEVKQLAQRARDNSLKPEDYEGGTFTVSNLGGPFGIKQFCAIVNPPQSAILAIGSAEKRVIPGAEGQFEVGSFMSATLSCDHRVIDGAIGAEWMKAFKGYIENPTTMLL

SEQ ID NO: 3456 - protein, 545 aa, Oryza sativa Indica Group
MALLLRHSPKLRRAHAILGCERGTVVRHFSSSTCSSLVKEDTVSSSNLHPEYAKKIGGSDFSHDRQSGKELQNFKVSPQEASRASNFMRASKYGMPITANGIHSLFSCGQVVPSRCFSSGADLPPHQEIGMPSLSPTMTEGNIARWVKKEGDKVSPGEVLCEVETDKATVEMECMEEGYLAKIIHGDGAKEIKVGEIIAVTVEEEEDIGKFKDYKAPSSAESAAPAESKPQSEPTEPKKEKEQPKATKTEESFLSEDRTFSSPIARKLAEDNNVPLSSIKGTGPDGRILKADIEDYLASVAKGAKKETAAAPGLGYVDLPNTQIRKVTANRLLHSKQTIPHYYLTVDTRVDKLIKLRSELNPLQDTSGGKKISINDLVIKAAALALRNVPECNSSWMNDFIRQYHNVNINVAVQTEDGLFVPVIRDADKKGLATIADEVKQLAQRARDNRLKPEDYEGGTFTVSNLGGPFGIKQFCAIVNPPQSAILAIGSAEKRVIPGAEGQFEVGSFMSATLSCDHRVIDGAIGAEWMKAFKGYIENPTTMLL

SEQ ID NO: 3457 - protein, 546 aa, Hordeum vulgare subsp. vulgare
MALLLRHSRKLRRVHGVLDWERGSIARNFSASACSAAAKGEAVSSSGVHGECGKKVGSSSIFQDRQSGKDLHTFKVSLREARGSYSSKQMPIAATGVNSLFSCGQVVSARHFSSGADLPPHEAIGMPSLSPTMTEGNIARWVKKEGDKVSPGEVLCEVETDKATVEMECMEEGYLAKIVCGDGAKEIKVGEIICITVEEEGDIEKFKDYKASSSPSAAAPAESKPQSEPVQPKEEKKEVSKAPEPTATKTEESSQSGDRLFSSPVARKLAEDNNVPLSSLKGTGPDGRILKADIEDYLSSASKGSKKEAAAAPGLGYVDLPNTQIRKVTANRLLQSKQTIPHYYLTVDSRVDKLIKLRSELNPMQDASGGKKISINDLVIKAAALALRKVPACNSSWMNDFIRQYHNVNINVAVQTEHGLFVPVVRDADKKGLATIADEVKQLALRARDNSLKPEDYEGGTFTVSNLGGPFGIKQFCAIVNPPQSAILAIGSAEKRVVPGVEGQFEVGSFMSATLSCDHRVIDGAMGAEWLKAFKSYLENPTTMLL

SEQ ID NO: 3458 - protein, 565 aa, Zea mays; identical to SEQ ID NO: 1043

SEQ ID NO: 3459 - protein, 553 aa, Zea mays
MASRRVVSSLLRSASRLRAASPAAPRPRAPPHRPSPAGYLFNRAAAYASSAAAQAAPATPPPATGKTGGGKITDEFTGAGAIGQVCQVIGAVVDVRFDEGLPPILTALEVLDNNIRLVLEVAQHLGENMVRTIAMDGTEGLVRGQRVLNTGSPITVPVGRATLGRIINVIGEPIDEKGDIKTNHFLPIHREAPAFVEQATEQQILVTGIKVVDLLAPYQRGGKIGLFGGAGVGKTVLIMELINNVAKAHGGFSVFAGVGERTREGNDLYREMIESGVIKLDDKQSESKCALVYGQMNEPPGARARVGLTGLTVAEHFRDAEGQDVLLFIDNIFRFTQANSEVSALLGRIPSAVGYQPTLATDLGGLQERITTTKKGSITSVQAIYVPADDLTDPAPATTFAHLDATTVLSRQISELGIYPAVDPLDSTSRMLSPHVLGEDHYNTARGVQKVLQNYKNLQDIIAILGMDELSEDDKLTVARARKIQRFLSQPFHVAEVFTGAPGKYVELKESVKSFQGVLDGKYDDLPEQSFYMVGGIEEVIAKAEKIAKESAS

SEQ ID NO: 3460 - protein, 553 aa, Zea mays
MASRRVVSSLLRSASRLRAASPAAPRPRGAPHRPSPAGYLFNRAAAYASAAAAQAAPATPPPATGKTGGGKITDEFTGAGAIGQVCQVIGAVVDVRYDEGLPPILTALEVLDNDIRLVLEVAQHLGENMVRTIAMDGTEGLVRGQRVLNTGSPITVPVGRATLGRIINVIGEPIDEKGDITTNHFLPIHREAPAFVEQATEQQILVTGIKVVDLLAPYQRGGKIGLFGGAGVGKTVLIMELINNVAKAHGGFSVFAGVGERTREGNDLYREMIESGVIKLGDKQSESKCALVYGQMNEPPGARARVGLTGLTVAEHFRDAEGQDVLLFIDNIFRFTQANSEVSALLGRIPSAVGYQPTLATDLGGLQERITTTKKGSITSVQAIYVPADDLTDPAPATTFAHLDATTVLSRQISELGIYPAVDPLDSTSRMLSPHVLGEDHYNTARGVQKVLQNYKNLQDIIAILGMDELSEDDKLTVARARKIQRFLSQPFHVAEVFTGAPGKYVELKESVKSFQGVLDGKYDDLPEQSFYMVGGIEEVIAKAEKIAKESAS

SEQ ID NO: 3461 - protein, 551 aa, Oryza sativa Japonica Group
MATRRALSSLVRAASRLRGASPAPRPRGPLHRPSPSGYLFNRAAAYATAAAAKERPPAPATGKATGGGKITDEFTGAGAIGQVCQVIGAVVDVRFDEGLPPILTALEVLDHNIRLVLEVAQHLGENMVRTIAMDGTEGLVRGQRVLNTGSPITVPVGRATLGRIMNVIGEPIDEKGDITTNHFLPIHREAPAFVEQATEQQILVTGIKVVDLVAPYQRGGKIGLFGGAGVGKTVLIMELINNVAKAHGGFSVFAGVGERTREGNDLYREMIESGVIKLGDKQSESKCALVYGQMNEPPGARARVGLTGLTVAVHFRDAEGQDVLLFIDNIFRFTQANSEVSALLGRIPSAVGYQPTLATDLGGLQERITTTKKGSITSVQAIYVPADDLTDPAPATTFAHLDATTVLSRQISELGIYPAVDPLDSTSRMLSPHVLGEDHYNTARGVQRVLQNYKNLQDIIAILGMDELSEDDRLTVRRARKIQRFLSQPFHVAEVFTGAPGKYVELKESVNSFQGVLDGKYDDLPEQSFYMVGGIEEVIAKAEKIAKESAS

SEQ ID NO: 3462 - protein, 551 aa, Hordeum vulgare subsp. vulgare
MATRRAISSVLRAASRIRAASPSPCPRAPLHRPSPAGFLLNRAAAYASSAAAEAAPVTPPPTSDKHTGSKITDEFTGAGSVGQVCQVIGAVVDVRFDDGLPPILTALEVLDNSIRLVLEVAQHLGENVVRTIAMDGTEGLVRGQKVLNTGSPITVPVGRATLGRIINVIGEPIDHKGDIKTNSYLPIHREAPAFVEQATEQQILVTGIKVVDLLAPYQRGGKIGLFGGAGVGKTVLIMELINNVAKAHGGFSVFAGVGERTREGNDLYREMIESGVIKLDDKQSESKCALVYGQMNEPPGARARVGLTGLTVAEHFRDAEGQDVLLFIDNIFRFTQANSEVSALLGRIPSAVGYQPTLATDLGGLQERITTTKKGSITSVQAIYVPADDLTDPAPATTFAHLDATTVLSRQISELGIYPAVDPLDSTSRMLSPHVLGQEHYNTARGVQKVLQNYKNLQDIIAILGMDELSEDDKLTVARARKIQRFLSQPFHVAEVFTGAPGKYVELKEGVQSFQGVLDGKYDDLSEQAFYMVGGIEEVIAKAEKIAKENA

SEQ ID NO: 3463 - protein, 557 aa, Oryza sativa Japonica Group
MATRRALTSVLRSASRLRAASPSPCPRRAPLHPHRRPSPAGFLLNRAAAAYASSAAAQAAPAPPPASGKATGGGKITDEFTGAGAVGQVCQVIGAVVDVRFDEGLPPILTALEVLDHNIRLVLEVAQHLGENMVRTIAMDGTEGLVRGQRVLNTGSPITVPVGRATLGRIMNVIGEPIDEKGDITTNHFLPIHREAPAFVEQATEQQILVTGIKVVDLLAPYQRGGKIGLFGGAGVGKTVLIMELINNVAKAHGGFSVFAGVGERTREGNDLYREMIESGVIKLGDKQSESKCALVYGQMNEPPGARARVGLTGLTVAEHFRDAEGQDVLLFIDNIFRFTQANSEVSALLGRIPSAVGYQPTLATDLGGLQERITTTKKGSITSVQAIYVPADDLTDPAPATTFAHLDATTVLSRQISELGIYPAVDPLDSTSRMLSPHVLGEDHYNTARGVQKVLQNYKNLQDIIAILGMDELSEDDKLTVARARKIQRFLSQPFHVAEVFTGAPGKYVELKESVQSFQGVLDGKYDDLPEQSFYMVGGIDEVIAKAEKIAKESAS

SEQ ID NO: 3464 - protein, 556 aa, Nicotiana sylvestris
MATRRLLASLLRSTAQRGGAISRSPLANSIPRTTSRASPKGFLLNRAVKYATSAAAEKPKATPPKPSGNEPTGKITDEFTGAGSIGKVCQVIGAVVDVRFDEGLPPILTALEVLDNQIRLVLEVAQHLGENMVRTIAMDGTEGLVRGQRVLNTGSPITVPVGRATLGRIINVIGEPIDERGDINTDHFLPIHREAPAFVEQATEQQILVTGIKVVDLLAPYQRGGKIGLFGGAGVGKTVLIMELINNVAKAHGGFSVFPGVGEPSAEGNDLYREMIESGVIKLGDKQSESKCALVYGQMNEPPGARARVGLTGLTVAEHFRDAEGQDVLLFIDNIFRFTQANSEVSALLGRIPSAVGYQPTLATDLGGLQERITTTKKGSITSVQAIYVPADDLTDPAPATTFAHLDATTVLSRQISELGIYPAVDPLDSTSRMLSPHILGEDHYNTARGVQKVLQNYKNLQDIIAILGMDELSEDDKMTVARARKIQRFLSQPFHVAEVFTGAPGKYVDLKESINSFQGVLDGKYDDLSEQSFYMVGGIDEVIAKAEKIAKESAA

SEQ ID NO: 3465 - protein, 553 aa, Nicotiana sylvestris
MASRRFLSSMLRSSIRHSSSKPSLTTHIHRPSPAGHLLHRAVNYATSAAAKATPAPQKKTPPPKIKETGGKITDEYTGAGAIGSVCQVIGAVVDVRFDEGLPPILTALEVMDNDIRLVLEVAQHLGENMVRTIAMDGTEGLVRGQRVLNTGSPITVPVGRATLGRIINVIGEAIDERGDIKTDHYLPIHREAPSFVEQATEQQILVTGIKVVDLLAPYQKGGKIGLFGGAGVGKTVLIMELINNVAKAHGGFSVFAGVGERTPEGNDLYRQMIESGVINLGDNQGESKCALVYGQMNEPPGARARVGLTGLTVAEHFRDAEGQDVLLFIDNIFRFTQANSEVSALLGRIPSAVGYQPTLPTHLGGLQQRITTTKKGSITSVQAIYVPADDLTDPAPATTFAHLDATTVLSRQISELGIYPAVDPLDSTSRMLSPHILGEDHYNTARGVQKVLQNYKNLQDIIAILGMDELSEDDKLTVARARKIQRFLSQPFHVAEVFTGAPGKYVDLKESIQSFQGVLDGKYDDLSEQSFYMVGGIEEVIAKAEKIAKESAS

SEQ ID NO: 3466 - protein, 555 aa, Nicotiana sylvestris
MSSRRLLASLLRSTAQRGGAISRSPLANSIPRTTSRASPKGFLLNRAVKYATSAAAEKPKATPPKPSGNEPTGKITDEFTGAGSIGKVCQVIGAVLDVRFDEGLPPILTALEVLDNQIRLVLEVAQHLGENMVRTIAMDGTEGLVRGQRVLNTGSPITVPVGRATLGRIINVIGEPIDERGDINTDHFLPIHREAPAFVEQATEQQILVTGIKVVDLLAPYQRGGKIGLFGGAGVGKTVLIMELINNVAKAHGFSVFPGVGEPSAEGNDLYREMIESGVIKLGDKQSESKCALVYGQMNEPPGARARVGLTGLTVAEHFRDAEGQDVLLFIDNIFRFTQANSEVSALLGRIPSAVGYQPTLATDLGGLQERITTTKKGSITSVQAIYVPADDLTDPAPATTFAHLDATTVLSRQISELGIYPAVDPLDSTSRMLSPHILGEDHYNTARGVQKVLQNYKNLQDIIAILGMDELSEDDKMTVARARKIQRFLSQPFHVAEVFTGAPGKYVDLKESINSFQGVLDGKYDDLSEQSFYMVGGIDEVIAKAEKIAKESAA

SEQ ID NO: 3467 - protein, 558 aa, Zea mays; identical to SEQ ID NO: 1044

SEQ ID NO: 3468 - protein, 578 aa, Zea mays
MEFARRGRGDEDIDDMHRFIDLPPPHVDPLLVIREALLSQLQKDRLRQEIIQVELAKIERAMVLCKCNSSHHGIAADDVEWTRPAPFTFREQSMRPWRWSVSQECYVDVDEVHDRKQKEGRHRSVVLKSEKPAMEDGECLRPCCNGKASQENSKVEDQKSQESSETIQPKTTLPSVKWELTGITIPVKKKKRHQKLSCEICQVQATSEHSLQEHRAGRKHQLKEAIDQKVQLTEESSSSTEQKTSSIKWSCSTCQANGTSESDLKEHLNGRTHRQNIKAQLMESDGIAKTNELQEPECPKNNAPQHSEKPPPMSSTHCLANSTHELELRGHLLAKPQALLDEISNLSRNSESREATVLPNIAPQHTEQTPGSNCSILQADSDCKLDLEHQFGAKIHQLNVQDLLEEAKKTGDFPPEIAKDQQPPSEWGCVICQAKCYSAPQFAQHCRGKKHQKKVEALQGGVDAKSSNLTTVHKAASNGPDCSSSSSEKVEDQTALWSCGVCNVQCNSESMLAGHCKEEEHMEKQKLRDFCEVCNLKCNSEKMLAHHLSGSKHQKRLSANKRNAVVAWVPVALRGIVQ

SEQ ID NO: 3469 - protein, 580 aa, Sorghum bicolor
MEFARRGRGDDDVDDGHRFMHLPPPHVDPMLVIREALLSQLQKDRLRQEIIQAELAKIEHAMVLRNGSRHGIAADDVEWTKPVPFTFREQSMPPWRWSVSQECYADVDEIHDPKQMEGRDRNVALKSEKPAMEEHIVECLRPCCCNGKAGQENSKLEEQKSQESSETVQPKMTSPSVKWELTGITIPVKKRHQKLGCEICHVQVTSEHSLQVHCAGRKHRSKEASYRKAQLTEESSSRTGQKTSSIKWSCSTCQVNGTSESDLKEHLNGRTHQQNIEAQLMEGDGMAKNNELQEPECHKSNVPQHLEKPPSMSSSAICLANAAHELELGGHLLAKLQALLDEIRNMSKNSESREETVLPNIAPQNAEQTSGSNCSIFQADSDCQLDLEHQIGSKIHQLNVQDLHEEAKETGDFPPEIAKNQQPPFEWDCVICQAKCYSASQFAHHCRGKKHQKKMDALQGEGVNGKSSNLTTENRLASNGSDSYSSSSEKVEEQTALWSCGICNLQCSSESMLAGHCEEDEHLEKQKLLDFCAVCNLQCNSQKMLAHHLSGNKHRKRLNANKRNAVVALVYQNSNGEIVQ

SEQ ID NO: 3470 - protein, 546 aa, Sorghum bicolor
MATRRALSSILRSASRLRSASPSPCPRAPLHHRPSPAGFILNRAAAYASSAAAQAAPAPPPPSTGKKTGGGKITDEFTGAGAIGQVCQVIGAVVDVRFDEGLPPILTALEVLDNNIRLVLEVAQHLGENMVRTIAMDGTEGLVRGQRVLNTGSPITVPVGRATLGRIINVIGEPIDERGDITTNHFLPIHREAPAFVEQATEQQILVTGIKVVDLLAPYQRGGKIGLFGGAGVGKTVLIMELINNVAKAHGGFSVFAGVGERTREGNDLYREMIESGVIKLGDKQSESKCALVYGQMNEPPGARARVGLTGLTVAEHFRDAEGQDVLLFIDNIFRFTQANSEVSALLGRIPSAVGYQPTLATDLGGLQERITTTKKGSITSVQAIYVPADDLTDPAPATTFAHLDATTVLSRQISELGIYPAVDPLDSTSRMLSPHVLGEDHYNTARGVQKVLQNYKNLQDIIAILGMDELSEDDKLTVARARKIQRFLSQPFHVAEVFTGAPGYVLFSGVLDGKYDDLPEQSFYMVGGIEEVIAKAEKIAKENAS

SEQ ID NO: 3471 - protein, 560 aa, Nicotiana plumbaginifolia
MASRRLLASLLRQSAQRGGGLISRSLGNSIPKSASRASSRASPKGFLLNRAVQYATSAAAPASQPSTPPKSGSEPSGKITDEFTGAGSIGKVCQVIGAVVDVRFDEGLPPILTALEVLDNQIRLVLEVAQHLGENMVRTIAMDGTEGLVRGQRVLNTGSPITVPVGRATLGRIINVIGEAIDERGPITTDHFLPIHREAPAFVEQATEQQILVTGIKVVDLLAPYQRGGKIGLFGGAGVGKTVLIMELINNVAKAHGGFSVFAGVGERTREGNDLYREMIESGVIKLGEKQSESKCALVYGQMNEPPGARARVGLTGLTVAEHFRDAEGQDVLLFIDNIFRFTQANSEVSALLGRIPSAVGYQPTLATDLGGLQERITTTKKGSITSVQAIYVPADDLTDPAPATTFAHLDATTVLSRQISELGIYPAVDPLDSTSRMLSPHILGEDHYNTARGVQKVLQNYKNLQDIIAILGMDELSEDDKMTVARARKIQRFLSQPFHVAEVFTGAPGKYVDLKESINSFQGVLDGKYDDLSEQSFYMVGGIDEVIAKAEKIAKESAA

SEQ ID NO: 3472 - protein, 552 aa, Oryza sativa Japonica Group
MATRRALSSLVRAASRLRGASPAPRPRGPLHRPSPSGYLFNRAAAYATAAAAKEAAPPAPATGKATGGGKITDEFTGAGAVGQVCQVIGAVVDVRFDEGLPPILTALEVLDHNIRLVLEVAQHLGENMVRTIAMDGTEGLVRGQRVLNTGSPITVPVGRATLGRIMNVIGEPIDEKGDITTNHFLPIHREAPAFVEQATEQQILVTGIKVVDLLAPYQRGGKIGLFGGAGVGKTVLIMELINNVAKAHGGFSVFAGVGERTREGNDLYREMIESGVIKLGDKQSESKCALVYGQMNEPPGARARVGLTGLTVAEHFRDAEGQDVLLFIDNIFRFTQANSEVSALLGRIPSAVGYQPTLATDLGGLQERITTTKKGSITSVQAIYVPADDLTDPAPATTFAHLDATTVLSRQISELGIYPAVDPLDSTSRMLSPHVLGEDHYNTARGVQKVLQNYKNLQDIIAILGMDELSEDDKLTVARARKIQRFLSQPFHVAEVFTGAPGKYVELKESVNSFQGVLDGKYDDLPEQSFYMVGGIEEVIAKAEKIAKESAS

SEQ ID NO: 3473 - protein, 557 aa, Gossypium hirsutum
MASRRLLSSFLRSTSRRSLSKSPSPTPRLPSPSPTRRPFPCPYFLSRDAEYSTSAAAAASAPSQPPPAKKGGKGKITDEFTGAGAIGQVCQVIGAVVDVRFDEGLPPILTALEVMDHSIRLVLEVAQHLGENMVRTIAMDGTEGLVRGQPVLNTGSPITVPVGRATLGRIINVIGEPIDEKGELKTDHFLPIHREAPAFVDQATEQQILVTGIKVVDLLAPYQRGGKIGLFGGAGVGKTVLIMELINNVAKAHGGFSVFAGVGERTREGNDLYREMIESGVIKLGEKQADSKCALVYGQMNEPPGARARVGLTGLTVAEHFRDAEGQDVLLFIDNIFRFTQANSEVSALLGRIPSAVGYQPTLATDLGGLQERITTTKKGSITSVQAIYVPADDLTDPAPATTFAHLDATTVLSRQISELGIYPAVDPLDSTSRMLSPHILGEEHYNTARGVQKVLQNYKNLQDIIAILGMDELSEDDKLTVARARKIQRFLSQPFHVAEVFTGAPGKYVELKESITSFQGVLDGKYDDLPEQSFYMVGGIEEVIAKADKIAKESAA

SEQ ID NO: 3474 - protein, 892 aa, Oryza sativa Japonica Group
MAPPRTSGLLLLLAAVVAAAAVVLVPPAEAAVASIDLGSEWLKVAAVHLAPGRVPIAVAINEMSKRKSPALAALADGNRLAGEEASGITARHPSKVFARARDLLAKPFPYVRSVAEALFLPYDLVPDARGAAAVRADDGQVYTVEEIVAMVLHYAAGLADAHVGAPVRDAVVAVPPYFGQAERRALTQAAQLAGVNVLALINEHAGAALQYGIDKDFSNESRHVIFYDMGAGSTYAALVYYSAYKAKEFGKTVSVNQFQVKDVRWDSKLGGLEMEMRLVNYFADQFNKQLGNGVDIRQSPKAMAKLKKQVKRTKEILSANTAAPISVESLYNDLDFRSTITREKFEELCEELWEQALTPVKEVLAHSGMKIDDIYAVELIGGATRVPKLQAKLQEFLGRSDLDKHLDADEAIVLGASLHAANLSDGIKLNRKLGMIDGSTYGFVFEINGPDYVKDESTDQLLVPRMKKLGIKMFRSIRHTKDFDVSISYEKASELPPGVTSHKFVEYSVSGLTDASEKYSSRNLSAPIKANLHFSLSRSGIISLDRAEAVIEITEWVEVPKKNLTLESNSTSQTLSSEGGAANDTSDSKENVSSDGDANKSSAPIDESNAQDIVTEKVLKKRTFRVPLKVVEKMAGAGSILSKELYSEAKTRLEALDKKDAERRRTAELKNNLESYIYSMKEKLEENTEILTVSTEQERESFAEKLNEMLKQMNLREALDQLKAIGDPILFRLSELKARPTACENARLYLAELQKIVKNWDSNKPWLPKKRVDEVVSEAEKVKTWLEEKEAIQKSTPVYSPPAFTSEEVYEKVLDLQDKVSSVNRIPKPKPKIEKKPPKEEESANKEKTDSSESESKEAESTETSSESAAPEESQSEPQKTDDLEPEAHDEL

SEQ ID NO: 3475 - protein, 902 aa, Oryza sativa Indica Group
MAPPRTSGLLLLLAAVVAAAAVVLVPPAEAAVASIDLGSEWLKVAAVHLAPGRVPIAVAINEMSKRKSPALAALADGNRLAGEEASGITARHPSKVFARARDLLAKPFPYVRSVAEALFLPYDLVPDARGAAAVRADDGQVYTVEEIVAMVLHYAAGLADAHVGAPVRDAVVAVPPYFGQAERRALTQAAQLAGVNVLALINEHAGAALQYGIDKDFSNESRHVIFYDMGAGSTYAALVYYSAYKAKEFGKTVSVNQFQVKDVRWDSKLGGLEMEMRLVNYFADQFNKQLGNGVDIRQSPKAMAKLKKQVKRTKEILSANTAAPISVESLYNDLDFRSTITREKFEELCEDLWEQALTPVKEVLAHSGMKIDDIYAVELIGGATRVPKLQAKLQEFLGRSDLDKHLDADEAIVLGASLHAANLSDGIKLNRKLGMIDGSTYGFVFEINGPDYVKDESTDQLLVPRMKKLGIKMFRSIRHTKDFDVSISYEKASELPPGVTSHKFVEYSVSGLTDASEKYSSHNLSAPIKANLHFSLSRSGIISLDRAEAVIEITEWVEVPKKNLTLESNSTSQTLSSEGGAANDTSDSKENVSSDGDANKSSAPIDESNAQAIVTEKVLKKRTFRVPLKVVEKMAGAGSILSKELYSEAKTRLEALDKKDAERRRTAELKNNLESYIYSMKEKLEENTEILTVSTEQERESFAEKLNEVQDWLYMDGEDAQANEFKERLDQLKAIGDPILFRLSELKARPAACENARLYLAELQKIVKNWDSNKPWLPKKRVDEVVSEAEKVKTWLEEKEAIQKSTSVYSPPAFTSEEVYEKVLDLQDKVSSVNRIPKPKPKIEKKPPKEEESANKEKTDSSESESKEAESTETSSESAAPEESQSEPQKTDDLEPEAHDEL

SEQ ID NO: 3476 - protein, 897 aa, Zea mays
MSQPRSYGILVAVLVAAAVAVPPATAAVASIDLGSEWLKVAAVHLAPGRAPIAVAINEMSKRKSPALASLADGNRLSGEEAAGITARHPSKVFARARDLLAKPLSYVQSVTDSLFLPYDLVPDARGAAAVRADDGQVYSLEEIVAMVLHYAAGLADAHVGAPVRDAVIAVPPYFGQAERRALTQAAQLAGINVLSLINEHAGAALQYGIDKDFSNASRHVIFYDMGAGSTYAALVYYSAYNAKEFGKTVSVNQFQVKDVRWNSELGGVQMEMRLVNYFAAQFNKQLGDGVDIRQSPKAMAKLKKQVKRTKEILSANTAAPISVESLYNDVDFRSTITREKFEELCEDLWEQALTPVKEVLTHSGMKIDDIYAVELIGGATRVPKLQAKLQEFLGRRGLDKHLDADEAIVLGASLHAANLSDGIKLNRKLGMIDGSTYAFVLEIDGLDYVKDESIDQILVPRMKKMPIKMFRSIRHTKDFDVSLNYDKAYELPPGIPSHKFAEYSVSGLTDASEKYANRNLSAPIKANLHSSLSRSGIIALDRAEAVIEITEWVEVPKKILTLESNITNQNSSSEVGAANSTTDSKENLSSGSNTNSSTPIDESNAQEIITEKVLKKRTFRVPLKVVEKTTGAGTILSKELYSEAKNRLEALDKKDAERRKTAELKNNLESYIYSMKEKLEESADILTVSTEQERESFAEKLSEVQDWLYMDGEDAQANEFKERLDQLKAIGDPILFRLNELKTRPTACENARLYLDELQKIVKNWETNKPWLPQKRVDEVVSEAEKVKAWLKEKENLQKNTPVFNPPVFTSEEVSEKVLDLQDKVSSVNRIPKPKPKVEKKTAKEEEPASKEKTTYTESAPDEGEYTETSQKSKAQEEDQSASANTSDSEPEPHDEL

SEQ ID NO: 3477 - protein, 894 aa, Hordeum vulgare subsp. vulgare
PARSLPRMAPRLLLLALVAAAVAVPPASAAVASIDLGSEWLKVAAVHLAPGRAPIAVAINEMSKRKSPALAALADGNRLAGEEAAGITARHPAKVFSRMRDLLAKPFPYARALADSLFLPYDLVQDARGAAAVRADDGQVYTVEEIVAMVLHYASGIADAHVGLPVRDAVVAVPPYFGQAERRALTQAAQLAGFNVLALVNEHAGAALQYGIDKDFSNESRHVIFYDMGSGSTYAALVYYSSYSAKEFGKTVSVNQFQVKDVRWNSKLGGLEMEMRLVNYFADQFNKQLGNGDDIRQSPKAMAKLKKQVKRTKEILSANTAAPISVESLYNDIDFRSTITREKFEELCEDLWEQALTPIKDVLAQSGMKISDIYAVELIGGATRVPKLQAKLQEFLGRSELDKHLDADEAIVLGASLHAANLSDGIKLNRKLGMIDGSTYGFVFEIDGPDYVKDESTDQVLVPRIKKMPIKLFRSIKHTKDFDVSLSYDKASELPPGVLSHKFADYAISGLTETTEKYGSRNLSAPIKANLHFSLSRSGIISLDRAEAVIEITEWVEVPKKNVTLETNTTDQTLSAESGTSDSTTDSKENSSSGSDADNSSTTNDESNVQDTITEKVLKKRTFRVPLKVTEKTAGAASILSKELYSEAKSRLDVLNKKDAERRRTAELKNNLESYIYSMKEKLEESTDMLTVSTEQERESFTEKLSEVQDWLYMDGEEAQANEFQERLDQLKAMGDPILFRMSELKARPAACGSARLYLTELQKIVKNWETSKPWLPKKRVDEVVSEADKLKAWLEEKEALQKSTPVHSLPAFTSEEVYKKVLALQDKVSSVNRIPKPKPKVEKKPPKEDANKDKTDSSESASSEPEPESTEKSSESDAPEKTNDSEPESHDEL

SEQ ID NO: 3478 - protein, 347 aa, Zea mays
MEVMVPVPYVMAPSAPCSPRTAAMAGADHLQAYCYFFSSAPTSPSRASCNCNPASSSPGGDEAASTFDFTLGFSGQLQEATPTLAAADELFEGGRIRPLNAPHPSILRVDDAASSGSAGGTRCSPRRAGGADRQAEATPLERGRSGCRPSAAAAAAPSSSRSRTRRATRSLSPFRGGSGLDAAAADDVDDESPPPSPRASSMIRGCGSGSGSRKWRLKDLFLFRSASEGRATGKDPLLKYTALSSASFWHPHGQPQRLSSASMRKGRGSAASASGDTPFATTNRAAAAEDVRRRTTTTTTTTPLPFHRNSLFGYLRSNPAIHSISRKLGGSGHSASSSSSRGSSRPT

SEQ ID NO: 3479 - protein, 347 aa, Zea mays
MAGGDHLPAYCYFFSSAPTSPSRASCNCNPASSPPGGDEASTFDFTLGFSGQLQEATPTLAAADELFEGGRIRPLNAPHPSILRVANDASSGSADGTRCSPRRAGGADRQAEAAPLERGRSGCRPSSAAAAAPSSSRSRSRRATRSLSPFRGGSGLDAAAADDVDDESPPPSPRASSMIRGCGSGSGSRKWRLKDLFLFRSASEGRATGKDPLLKYTALSSASFWHPHGQPQRLSSASMSMRKGRGSAASAGDTPYATINRAAAAEDVRRRTTTATTTPLPFHRNSLFGYLRSNPAIHSISRKLGGSGHSGSSSSSSRGGRQAAGRHDDPYARTARRTAPHQESRRR

SEQ ID NO: 3480 - protein, 373 aa, Zea mays
MLEEYKPCAAMVVTQCIYAALALLSKAAFTGGMSPLVFVVYRQAVATIVLVPVVIAANRKKMKEMTTGLGLTGFSLVFVASLVGATVNQCMYYQGVNLGSSSMATAMTNLIPAITFVMAASVGLERVEARRPRSLAKIFGTAVCVSGAMAMAFFKGPKLLGDGPNALQLLLHAGGGGRWVAGALFLVGSSSCWSLWLILQVPICKSYVEPLALSAWMCVLSTLQSALLVSFLLPDPSAWRIHSLFELSCCVFSGVFGSGVTFYLQSWCISVRGPLYSAMFNPLCTVITTVFAAAVLREELHVGSLLGAIAVIAGLYVVLWGKAGDANKGGVEPEHHSDDLEKTSSARSDPNSTAGVGSGIAEPLLAGGDPTEK

SEQ ID NO: 3481 - protein, 380 aa, Sorghum bicolor
MGMEEYKPCAAMVVTQCIYAALALWSKAAFTGGMSPLVFVVYRQAVATIVLVPVAVAANRRKMKEMMGRLGMTGFSLVFVASLVGATVNQCLYYQGVNLGSSSMATAMTNLIPAITFVMAASVGLERVEVRRPRSLAKIFGTAVCVSGAMAMAFFKGPKLLLGDLHDALLLPLHSPAAGGGSSRWVAGALFLVGSSSCWSLWLILQVPICKSYVDPLALSAWMCLLSTLQSALLVAFLLPDPAAWRIHSLFDLSCCLFSGVLGSGVTFYLQSWSISVRGPLYSAMFNPLCTVITTVFAAAVLREELHVGSLLGAIAVIAGLYVVLWGKAGDAKRRGLQDQEPEQHSDDDLEKTSARSDSMVDVGNGIAEPLLAGGDPTAK

SEQ ID NO: 3482 - protein, 374 aa, Oryza sativa Japonica Group
MGAGWEEYKPCAAMVAAQCIYAALALWAKAVFTGGMSTMVFVVYRQAIATVFLVPIAIIANRRKKKETRLGMTGFSLIFVASLFGATVNQYVYYQGLHLGSSSMATAMSNLIPAITFVMAASVGLEKVDLRRVRSLAKIFGTTVCVGGAMAMAFFKGPRLLNSSSLIVDLNFLLHSSASSKWVMGALFLICSSCCWSLWLILQVPICKSYMDPLTLSAWMCFLSTLQSAVLVSFLVPDINAWKIHSLFELGCCLFAGVFGSGVTFYLQSWCISVRGPLYSAMFNPLCTVIATVVAAAFLHEELHIGSLFGATAIVAGLYIVLWGKAADGGGKSGGSVPEHSHDVEKAAMRSESQLDVGEGITEPLLEAGNTAEK

SEQ ID NO: 3483 - protein, 431 aa, Oryza sativa Indica Group
MGAGWEEYKPCAAMVAAQCIYAALALWAKAVFTGGMSTMVFVVYRQAIATVFLVPIAIIANRRKKKETRLGMTGFSLIFVASLFGATVNQYVYYQGLHLGSSSMATAMSNLIPAITFVMAASVGPTLNHTLFQVINIVLGYRLICQKPKAAYMFLLVQRTLVPAINFVVITRDKGLERNDGLEKVDLRRVRSLAKIFGTTVCVGGAMAMAFFKGPRLLNSSSLIVDLNFLLHSSASSKWVMGALFLICSSCCWSLWLILQVPICKSYMDPLTLSAWMCFLSTLQSAVLVSFLVPDINAWKIHSLFELGCCLFAGVFGSGVTFYLQSWCISVRGPLYSAMFNPLCTVIATVVAAAFLHEELHIGSLFGATAIVAGLYIVLWGKAADGGGKSGGSVPEHSHDVEKAAMRSESQLDVGEGITEPLLEAGNTAEK

SEQ ID NO: 3484 - protein, 483 aa, Zea mays; identical to SEQ ID NO: 1045

SEQ ID NO: 3485 - protein, 764 aa, Sorghum bicolor
MRRHGEVCVIFAVAAAALLVAAATPAAAGREDRQTYIVHMSHSAMPSDFVEHEEWYAASLQAVSDAATVLYTYNTLLHGYSARLTRAEAAALESQPGVLVVNPEVRYELHTTRTWEFLGLDGTDALFPQSGTGSDVIVGVLDTGVWPERPSYDDTGFGPVPAGWKGKCEDGNDFNATACNKKLIGARFFLTGYEAAKGPVDTSKESRSPRDNDGHGTHTSSTAAGGAVQGADLLGYAAGTAKGMAPRARVATYKVCWVGGCFSSDILKAMEVAVTDGVDVLSLSLGGGTAEYYRDSIAVGAFSAMEKGIFVSCSAGNAGPGAATLSNGAPWITTVGAGTIDRDFPAYVMLGNGKNYTGVSLYSGKLLPTTPVPFIYAGNASNSSMGQLCMSGSLIPEKVAGKIVLCDRGTNARVQKGFVVKDAGGAGMVLANTAANGEELVADAHVLPGSGVGEKAGNAMRDYAMSDPKATATIVFAGTKVGIKPSPVVAAFSSRGPNTVTSSILKPDVIAPGVNILAAWSGSVGPSGLPGDSRRVGFNIISGTSMSCPHVSGLAALLRAAHPEWSPAAIRSALMTTAYNDYPGGAGILDVATGRPATPLDVGAGHVDPAKAVDPGLVYDITAADYIDFLCANNYEPAQIAALTRQHPSEGCSANRTYTVTALNYPSFSVAFPAAGGTVKHTRTVTNVGQPGTYKVTASAAAGSAPVTVSVEPSTLSFSKAGEKQSYTVSFTAGGMASGTNGFGRLVWSSDHHVVASPIAATWT

SEQ ID NO: 3486 - protein, 764 aa, Zea mays
MRRHGEVRVIFAMAAAAAAALLASAAVAGRDGRQTYIVHMSHSAMPDEFAEHEEWYAASLQAVSDAATVLYTYSTLLHGYSARLTRAEAAALESQPGVIVVNPEVRYELHTTRTPEFLGLDGTDALFPQSGTGTDVVVGVLDTGVWPERPSYDDTGFGPVPAGWKGKCEDGNDFNASACNKKLIGARFFLTGYEAAKGPVDTSKESRSPRDNDGHGTHTSTTAAGGAVQGADLLGYAAGTAKGMAPRARVATYKVCWVGGCFSSDILKAMEVAVTDGVDVLSLSLGGGTAEYYRDSIAVGAFSAMEKGIFVSCSAGNAGPGAATLSNGAPWITTVGAGTIDRDFPAYVTLGNGKNYTGVSLYSGKPLPTTPMPFIYAGNASNSSMGQLCMSGSLIPEKVAGKIVLCDRGTNARVQKGFVVKDAGGAGMVLANTAANGEELVADAHVLPGSGVGEQAGNAMRDYAMSDPKATATIVFAGTKVGVKPSPVVAAFSSRGPNTVTSSVLKPDIIAPGVNILAAWSGSVGPSGLPGDGRRVGFNIISGTSMSCPHVSGLAALLRAAHPEWSPAAIRSALMTTAYNEYPGGNGILDVATGRPATPLDVGAGHVDPAKAVDPGLVYDIAAADYVDFLCANNYEAAQIAALTRQHASEGCSANRTYAVTALNYPSFSVAFPAAGGTAKHTRTVTNVGQPGTYKVAASAAAAGTPVTVTVEPSTLSFSRAGEKQSYTVSFTAGGMPSGTNGFGRLVWSSDHHVVASPIAATWT

SEQ ID NO: 3487 - protein, 764 aa, Oryza sativa Japonica Group
MWRHGERCVILAVAAVALVAAATATAAAAVGGERRTYIVHMSRSAKPNDFVEHGEWYAASLQSVSDAATVLYTYDTIVHGYSARLTRAEAEALESQPGVLLVNPEVRYELHTTRTPEFLGLDRTDALFPQSNTGSDVIVGVLDTGVWPERPSYDDAGLGPVPAGWKGKCEEGNDFNASACNKKLIGARFFLTGYEAAKGPVDTSKESRSPRDNDGHGTHTSSTAAGSAVRGADLLGYAAGTAKGMAPHARVATYKVCWVGGCFSSDILKAMEVAVNDGVDVLSLSLGGGTADYYRDSIAVGAYSAMERGIFVSCSAGNAGPGSATLSNGAPWITTVGAGTLDRDFPAHVVLGNGKNYSGVSLYSGKQLPTTPVPFIYAGNASNSSMGALCMSGSLIPEKVAGKIVLCDRGTNARVQKGFVVKDAGGAGMVLANTAANGEELVADAHVLPGAGVGQKAGDTMRAYALSDPNPTASIVFAGTQVGIQPSPVVAAFSSRGPNTVTPGILKPDLIAPGVNILAAWSGSVGPSGLAGDSRRVGFNIISGTSMSCPHVSGLAALLRAAHQDWSPAAIRSALMTTSYNGYPNGNGILDVATGLPATPLDVGAGHVDPSKAVDPGLVYDIAAADYVDFLCAISYGPMQIAALTKHTTDACSGNRTYAVTALNYPSFSVTFPATGGTEKHTRTVTNVGQPGTYKVTASAAAGSTPVTVSVEPSTLTFTKSGEKQSYTVSFAAAAMPSGTNGFGRLVWSSDHHVVSSPIAVTWT

SEQ ID NO: 3488 - protein, 764 aa, Hordeum vulgare subsp. vulgare
MWCHGRRSALFAVAVAAILAAAAAAGEVVHDGRRTYIVHCSHAAMPSEFAAHADWYASSLQSVSGGAAAVIYTYDTLLHGYSARLTRAEARALEAQPGVLLVNPETRYELHTTRTPEFLGLDRAEALFPESNTASDVVVGVLDTGVWPERASYDDAGLGPVPAGWKGKCEGGSDFNSSACNRKLIGARFFLAGYEASKGPVDTSKESRSPRDNDGHGTHTSSTAAGSAVHGADLLGYASGTAKGMAPRARVATYKVCWVGGCFSSDILKGMEVAVADGVDVLSLSLGGGTSDYYRDSIAVGAYSAMEKGIFVSCSAGNAGPGAASLTNGAPWITTVGAGTLDRDFPAYVTLGNGNKYDGVSLYSGKQLPTTPVPFIYAGNASNSSMGALCMTGTLIPAKVAGKIVLCDRGTNARVQKGFVVRDAGGAGMVLANTAANGEELVADAHILPGAGVGEKAGNAMRTYASSDPKPTANIVFAGTKVGVQPSPVVAAFSSRGPNTVTPGILKPDLIAPGVNILAAWSGSVGPSGIADDHRRTSFNIISGTSMSCPHVSGLAAFLRSAHQDWSPAAIRSALMTTAYAAYPNGDGLLDVATELAATPLDMGAGHVDPSKAVDPGLVYDLTAADYLDFLCAIEYEPAQIAALTKHSSDRCSASRTYSVAALNYPSFSATFPAAGGTEKHTRTLTNVGKPGTYKVTAAAAAGSTAIKVSVEPSTLSFSKVGEKKSYTVSFSAGGKPSGTNGFGRLVWSSDHHVVASPILATWT

SEQ ID NO: 3489 - protein, 522 aa, Zea mays; identical to SEQ ID NO: 1046

SEQ ID NO: 3490 - protein, 459 aa, Oryza sativa Indica Group
MERGIFVSCSAGNAGPGSATLSNGAPWITTVGAGTLDRDFPAHVVLGNGKNYSGVSLYSGKQLPTTPVPFIYAGNASNSSMGALCMSGSLIPEKVAGKIVLCDRGTNARVQKGFVVKDAGGAGMVLANTAANGEELVADAHVLPGAGVGQKAGDTMRAYALSDPNPTASIVFAGTQVGIQPSPVVAAFSSRGPNTVTPGILKPDLIAPGVNILAAWSGSVGPSGLAGDSRRVGFNIISGTSMSCPHVSGLAALLRAAHQDWSPAAIRSALMTTSYNGYPNGNGILDVATGLPATPLDVGAGHVDPSKAVDPGLVYDIAAADYVDFLCAISYGPMQIAALTKHTTDACSGNRTYAVTALNYPSFSVTFPATGGTEKHTRTVTNVGQPGTYKVTASAAAGSTPVTVSVEPSTLTFTKSGEKQSYTVSFAAAAMPSGTNGFGRLVWSSDHHVVSSPIAVTWT

SEQ ID NO: 3491 - protein, 499 aa, Sorghum bicolor
MAIASRVTKRALSTFAAAKLPEEAVAAAAAGEAIAATTAAAVPLASSERTAIARAALLQFEDTGRLFAGEPTSALLRTLAALQALSVGPLVDAATAALRSPAVAGSALGRAAARATAYRHFCAGETADEAAAVVRRLWRGGMGGILDYGIEDAEDGDACDRNAAGFISAVDVAAALPPGSASVCIKITALCPIALLEKTSDLLRWQKKHPSFNLPWKTHSFPILSDSSPLHLTPSEPPALTSEEETELQLAHERLLAVCARCAEHGIPLLVDAEYATVQPAIDYFTFVGALAFNDGAGAGDCEQRPIVHGTIQAYLRDARDRLEAMVRSAERERVRLGLKVVRGAYLARETRLAATLGVPSPIHGSIQETHDCYNGCAGFLLDRVRRGTASVMLATHNVESGKLAAARAQELGIPRGDRNLQFAQLMGMADGLSLSLRNAGFQVSKYLPYGPVEQIIPYLIRRAEENRGLLSASSFDRHLLRKELVRRVKTAVVGMGRE

SEQ ID NO: 3492 - protein, 492 aa, Zea mays
MAIASRATKRALSTFAAAKLPEEAVAAAAAGEAIAARSHQAVPLPPAPASSVRPLQFEDTGRLFAGGPTSALLRTLAALQALSVGPLVDAATAALRSPAVAGSALGRAAARATAYRHFCAGETADEAAAVVRRLWRGGMGGILDYGIEDAEDGHACDRNAAGFVSAVDVAASLPPGSASVCIKITALCPIALLEKASDLLRWQKKHPSFSLPWKTHSFPVLSDSSPLHLTASEPAALTAEEERELQLAHSRLLAVCARCAEHGIPLLVDAEYATVQPAIDYFTLVGALAFNDAGAADGGRPIVHGTIQAYLRDARDRLEAMVRGAERERVRLGLKVVRGAYLTREARLAAALGVPSPVHGSIQETHDCYNGCAAFLLDRVRRGSASVMLATHNVESGQLAAARAQELGIPKGDRNLQFAQLMGMADGLSLSLRNAGFQVSKYLPYGPVEQIIPYLIRRAEENRGLLSASSFDRQLLRKELVRRVKAMVAGRE

SEQ ID NO: 3493 - protein, 478 aa, Zea mays
MAIASRATKRALSTFAAAKLPEEAIAATAAVPVPLAPAPASSERALLQFEDTGRLFAGEPTPALLRTLAALQALSVGPLVDAATAALRSPAVAGSALGRAAARATAYRHFCAGETAGEAAAAVRRLWRGGMGGILDYGIEDAEDGGACDRNAAGFASAVDVAAKLPPGSASVCIKITALCPIALLEKASDLLRWQKRHPSLNLPWKTHDFPILSDSSPLHLTASEPPALSAEEERELELAHERVLAVCARCAERGVPLLVDAEYAAVQPAIDYLTLAGALACNAERSIVHGTVQAYLRDARERLETMARGVERARVRLGVKLVRGAYLAREARVAAALGVPSPVHGSIRETHDCYNGCAAFLLDRVRRGSASVVLATHNVESGQLAAARAEELGIPRGDRNLQFAQLMGMADGLSLGLRNAGFQVSKYLPYGPVEQIVPYLIRRAEENRGLLSASSFDRQLLREELVRRFKAAVLGRE

SEQ ID NO: 3494 - protein, 481 aa, Hordeum vulgare subsp. vulgare
MAIASRITKRALSTFAAAAKLPEAAVAAAGADAVPVPSSAQQQQQHQVLEFEDTGRLFTGEPSTALVRTLAALQLMSAGPLVDVGIAALRSPAVAASPVVQAAARATAYKHFCAGETADEAAARVQRLWRGGMGGILDYGIEDAEDGAACDRNVAGFLAAVDVAAALPPGSASVCIKITALCPIALLEKTSDLLRWQHKNPSLHLPWKQHSFPILSDSSPLYLTPSEPAALTAEEERELQLAHDRLLAVGARCAEHDIPLLVDAEYASVQPSIDYFTFVGALACNGGGRPIVHGTVQAYLRDARDRLDAMVRAAEEERVCLGVKIVRGAYLTREARLAESLGVPSPIHGSIQDTHDCYNGCAAFLLERVRRGSASVMLATHNVESGQLAAARAQELGIGKGDRNLQFAQLMGMADGLSLGLRNAGFQVSKYLPYGPVEHIIPYLIRRAEENRGLLSASAFDRQLLRKELVRRFKNAVMGRE

SEQ ID NO: 3495 - protein, 490 aa, Oryza sativa Indica Group
MAIASRIQKRVLASFAAAAAAKLPEAAVAAAGGAAEAVEEVASSAQEQVQAQGAQVLEFGDTERLFAGERSTSLVRTLAVLQALSVGPLVDVATAALRSPAVAGSAAGRAAARATAYQHFCAGETAEEAAAAVRRLWRGGMGGILDYGIEDAEDGPACDRNAAGFLAAIDVAAALPPGSASVCIKITALCPVALLEKASDLLRWQQKHPATKLPWKVHGFPVLCVSSPLYLTAAEPPALEAEEERELEMAHGRLLAIGERCAEYDIPLLVDAEYATVQPAIDYFTFAGALAFNGGGRPIVHGTVQAYLRDARDRLEAMARAAQGERVCLALKLVRGAYLAREARLAASLGVPSPVHRSIQDTHDCYNGCAAFLLDRVRRGAAAVTLATHNVESGQLAAARALELGIGGGGDRGLQFAQLMGMADGLSLGLRNAGFQVSKYLPYGPVEQIIPYLIRRAEENRGLLSSSSFDRQLLRKELVRRFKAAMLGRE

SEQ ID NO: 3496 - protein, 490 aa, Oryza sativa Japonica Group
MAIASRIQKRVLASFAAAAAAKLPEAAVAAAGGAAEAVEEVASSVQEQVQAQGAQVLEFGDTERLFAGERSTSLVRTLAVLQALSVGPLVDVATAALRSPAVAGSAAGRAAARATAYQHFCAGETAEEAAAAVRRLWRGGMGGILDYGIEDAEDGPACDRNAAGFLAAIDVAAALPPGSASVCIKITALCPVALLEKASDLLRWQQKHPATKLPWKVHGFPVLCVSSPLYLTAAEPPALEAEEERELEMAHGRLLAIGERCAEYDIPLLVDAEYATVQPAIDYFTFAGALAFNGGGRPIVHGTVQAYLRDARDRLEAMARAAQGERVCLALKLVRGAYLAREARLAASLGVPSPVHRSIQDTHDCYNGCAAFLLDRVRRGAAAVTLATHNVESGQLAAARALELGIGGGGDRGLQFAQLMGMADGLSLGLRNAGFQVSKYLPYGPVEQIIPYLIRRAEENRGLLSSSSFDRQLLRKELVRRFKAAMLGRE

SEQ ID NO: 3497 - protein, 475 aa, Oryza sativa Japonica Group
MAIASRIQKRVLASFAAAAAAKLPEAAVAAAGGAAEAVEEVASSVQEQVQAQGAQVLEFGDTERLFAGERSTSLVRTLAVLQALSVGPLVDVATAALRSPAVAGSAAGRAAARATAYQHFCAGETAEEAAAAVRRLWRGGMGGILDYGIEDAEDGPACDRNAAGFLAAIDVAAALPPGSASVCIKITALCPVALLEKASDLLRWQQKHPATKLPWKVHGFPVLCVSSPLYLTAAEPPALEAEEERELEMAHGRLLAIGERCAEYDIPLLVDAEYATVQPAIDYFTFAGALAFNGGGRPIVHGTVQAYLRDARDRLEAMARAAQGERVCLALKLVRGAYLAREARLAASLGVPSPVHRSIQDTHDCYNGCAAFLLDRVRRGAAAVTLATHNVESGQLAAARALELGIGGGGDRGLQFAQLMGMADGLSLGLRNAGFQVSKYLPYGPVEQIIPYLIRRAEENRGLLSSSSFDRQLLR

SEQ ID NO: 3498 - protein, 347 aa, Zea mays; identical to SEQ ID NO: 3479

SEQ ID NO: 3499 - protein, 309 aa, Zea mays; identical to SEQ ID NO: 1047

SEQ ID NO: 3500 - protein, 310 aa, Sorghum bicolor
MATAMSPSPSAAIARPSHPRSCAAASVALRSGFLGRGLAAVVPVAVDDPRCRLRRRVSFSVRMAWDGPLSSVRLIMQGRNVKLSDKLKEHIEDKVGRAVSKHCHLVREVDVRLSARGGELGRGPKTSRCEITLFSKRHGVLRAEEDAESTYASIDLAAAIIKRKLRKIKEKETEVRRDGDGGAGGAWEEELPLLDDDLVEADELAAAVGAEDEQTVVAKVVRTKVFEMPPLTVEEALEQLDNVGHNFYCFRDEATGQVNILYRRKEGGYGLIIPKEDGNFDNKDTVGVAQPPPPAAPEPSLAVHTAADNN

SEQ ID NO: 3501 - protein, 352 aa, Zea mays
MSSGGGDHHGVYHQQHGHGHGHLARADGAEYAFHGNDDMESFFFNHPASAGLDGGGSRTTGADELLAPYSSITDYLQGLLDPSGLARHLDAPLKHELSVDASHDSQGTSGAPGGEAAAMHTPNSSVSLSSSDRDGEGQQPRRCKKGRTNKAEDAEGDEKDQQDGENSTKANKSKKKAEKRQRQPRVAFLTKSEVDHLEDGYRWRKYGQKAVKNSPYPRSYYRCTTPKCGVKKRVERSYQDPSTVITTYEGQHTHHSPASLRAGGAHLFMSSAHALPPHLTMPSSSFRPDLNLMSMMHPAMVGANPNMFLPSMPPPPHMSTPSPAPDPPLQQHHFTDYALLQDLFPSTMPNNP

SEQ ID NO: 3502 - protein, 361 aa, Sorghum bicolor
MSSGGGGSSGGGGDHHGVYHQHGHGHLARADAGAEYVFHSNDMESFFFNQPAASAGVDGSGSRTTGAADELMPPYSSITDYLQGFLQDPSGLARHLDAPCLPAEDAPLKHELSVDVSHDSQGTSGAPGGEGAAMHTPNSSVSLSSSDREGEGGQQPRRCKKGRPKAEDAEGDEKEQEDGENSSKANKSKKKAEKRQRQPRVAFLTKSEVDHLEDGYRWRKYGQKAVKNSPYPRSYYRCTTPKCGVKKRVERSYQDPSTVITTYEGQHTHHSPASLRAGGAHLFMSNAHGGLPPHLMPSSFGRPDLMSMMHPAMGANPSMFLPSMPPPHMSTPSPAPPLQQHHFTDYALLQDLFPSTMPNNP

SEQ ID NO: 3503 - protein, 531 aa, Sorghum bicolor
MSKPWGGVGAWALDAERAEEEEREQALSFPAPEPPAAAGGAASFPSLREAAAAGAGGKSKKNKNKGTTLSLSEFTTYGAAAAQRRAAPVEPRGLTHEEMMMLPTGPRERSAEELDRSRGFRSYGGGGGGFGGPGGGERRGGFDDEGRRGPGRSSDLDMPSRADEADDWGATKKFTPAPADSGRRDRFGGPSPLGRADDIDDWSRDKKPLPSRYPSLGSGGGGFRDSPGFRDSSAASDADRWVRGATPMPHNGQGSGERPRIVLNPPPKRDPAAAASTPPAEVARNRPSPFGAARPREDVLAEKGVDWRKVENEIEQKTSRPTSSHSSRPNSAHSSRPGSPGSQVSAVGSEGAPRARPKVNPFGDAKPRELVLQEKGKDWRKIDLELEHRAINRPESDEEKNLKEEINLLKVDLKEIEGKMSNGSDQTSVDAKDLSEKISQLESQLEQLSRELDDKIRFGQRPRSGAGRVTTHAPTSLGEEPQATVVDRPRSRGGMEPPPRQEERWGFQGSRERGSFGGSRNSDRPMARQRW

SEQ ID NO: 3504 - protein, 527 aa, Zea mays
  misc_feature (256)..(256): Xaa can be any naturally occurring amino acid
MSKPWGSVGAGAWALDAERAEEEEREQALTFPALEPPLPAGGAASFPSLREAAAAGGGGKSKKKNKGTTLSLSEFTTYGAAAAQRRAAPVEPKGLTHDEMLLLPTGPRERSAEELDRSRGFRSYGGGSGFGGPGGERRSGFDDEDRRGPGRSSDLDMPSRADEADDWGATKKFTPAPTDSGRRDRFGGPSPLGRADDIDDWSRGKKPLPARYPSLGSGGGFRDSPAFRDSPAASDSDRWVRGATPLPHNGEGAGEXPRIVLNPPKRDPLVASTPPAEVARNRPSPFGAARPREDVLAEKGVDWRKFENEIEHKTSRPTSSHSSRPNSAHSSRPGSPGSQVSAVGSEGAPRARPKVNPFGDAKPREVVLQEKGKDWRKIDIELEHRAINRPESDEERNLKEEINLLKVDLKEIERNMSNGSDQTSVDAKGLSEKISQLESQLEQLSRELDDKIRFGQRPRSGAGRVTALAPTSLGEEPHATVVDRPRSRGGMEPPPRQEERWGFQGSRERGSFGASRNSDRPMARQRW

SEQ ID NO: 3505 - protein, 532 aa, Oryza sativa Japonica Group
MAKPWGGVGAWALDAERAEEEEREQAAAFPAPEPPAAAGGAASFPSLREAAAAAGGGKQKKKNKGTTLSLSEFSGYGAQGQRRGGGGAAPVDPRGLTPEEMMMLPTGPRERSAEELDRSRGFRSYGGGFGAGGGDRRGGFDDDRRGPGRSSDLDMPSRADEADNWGTNKRFTPALGDSGRRDRFGGPSPAGRSDDIDDWSRDKKPMPSRYPSLGSGGGGGGGFRESPGFRDSPGPSDSDRWSRGGSFAPMPHNGERERPRLNLDPPKRDPLATATPPAEVARNRPSPFGAARPREEVLAEKGLDWRKMETEIEQKTSRPTSSQSSRPNSAHSSRPGSPGSQVSAVGSEGAPRSRPKVNPFGNAKPREVVLQEKGKDWRKIDLELEHRAVNRPETNEERILKEEINLLKEKLKESEANKTDGPDQASPEDPEDLSEKITQMEKQLELLTIELDDKVRFGQRPGSGAGRVSAVPPAIAEEPQIVVSIVDRPRSRGGMEPFPKPAEERWGFQGSRERGSFGGSRSSDRPMTRQRW

SEQ ID NO: 3506 - protein, 532 aa, Oryza sativa Japonica Group
MAKPWGGVGAWALDAERAEEEEREQAAAFPAPEPPAAARWRRQLPEPPRGRRGGGRGKQKKKNKGTTLSLSEFSGYGAQGQRRAGGGAVPVDPRGLTPEEMMMLPTGPRERSAEELDRSRGFRSYGGGFGAGGGDRRGGFDDDRRGPGRSSDLDMPSRADEADNWGTNKRFTPALGDSGRRDRFGGPSPAGRSDDIDDWSRDKKPMPSRYPSLGSGGGGGGGFRESPGFRDSPGPSDSDRWSRGGSFAPMPHNGERERPRLNLDPPKRDPLATATPPAEVARNRPSPFGAARPREEVLAEKGLDWRKMETEIEQKTSRPTSSQSSRPNSAHSSRPGSPGSQVSAVGSEGAPRSRPKVNPFGNAKPREVVLQEKGKDWRKIDLELEHRAVNRPETNEERILKEEINLLKEKLKESEANKTDGPDQASPEDPEDLSEKITQMEKQLELLTIELDDKVRFGQRPGSGAGRVSAVPPAIAEEPQIVVSIVDRPRSRGGMEPFPKPAEERWGFQGSRERGSFGGSRSSDRPMTRQRW

SEQ ID NO: 3507 - protein, 546 aa, Oryza sativa Japonica Group
MAKPWGGVGAWALDAERAEEEEREQAAAFPAPEPPAAAGGAASFPSLREAAAAAGGGKQKKKNKGTTLSLSEFSGYGAQGQRRGGGGAAPVDPRGLTPEEMMMLPTGPRERSAEELDRSRGFRSYGGGFGAGGGDRRGGFDDDRRGPGRSSDLDMPSRADEADNWGTNKRFTPALGDSGRRDRFGGPSPAGRSDDIDDWSRDKKPMPSRYPSLGSGGGGGGGFRESPGFRDSPGPSDSDRWSRGGSFAPMPHNGERERPRLNLDPPKRDPLATATPPAEVARNRPSPFGAARPREEVLAEKGLDWRKMETEIEQKTSRPTSSQSSRPNSAHSSRPGSPGSQVSAVGSEGAPRSRPKVNPFGNAKPREVVLQEKGKDWRKIDLELEHRAVNRPETNEERILKEEINLLKEKLKESEANKTDGPDQASPEDPEDLSEKITQMEKQLELLTIELDDKVRFGQRPGSGAGRVSAVPPAIAEEPQIVVSIVDRPRSRGGMEPFPKPAEERWGFQGSRERGSFGGSRSSDRFEIERIVYCSIEDESWNGIFV

SEQ ID NO: 3508 - protein, 527 aa, Triticum aestivum
MAKPWGGVGAWALDAEREDEEREHAAAFPAPDPPAAAGGAASFPSLKEAVVAGGGKQKKKKGTTLSLSEFTTYGAAGAPRRVAPAEPKGLTPQEMMMLPTGPRERSEDELDRSRGFRSYGGDREPRGGGFDDDRRSSRDSDLDMPSRADESDNWGKNKSFSPAPTDSGRRDRLSGPSPLGRSDDIDNWSRDKKPLPSRYPSLGTGGGFRESSGGGFRESSGGGFRESSGGGFRDSPGPSDSDRWVRGAVPAPMTNNGDRPRLNLNPPKRDPSATPVPAAEVARSRPSPFGAAKPREEVLAEKGLDWRKMEGEIEKKTSRPTSSHSSRPNSAHSSRPGSPGSQVSAVGSEGAPRARPKVNPFGDAKPREVVLQEKGKDWRKIDLELEHRAVNRPESEEEKNLKEEINLLKVDLKEIEAIAGDGSEQAKEVSEKISQMEKQLDLLTVELDDKIRFGQRPSSGAGRAAAFPPASEEPHVAVAHMDRPRSRGGVETYPKPVEERWGFHGSRERGSFGGGGSSDRSSTRQGW

SEQ ID NO: 3509 - protein, 535 aa, Hordeum vulgare subsp. vulgare
MAKPWGGVGAWALDAEREDEEREHAASFPAPDPPAAAGGAASFPSLKEAVVAGGGKQKKKKGTTLSLSEFTTYGAAGAPRRAAPAEPKGLTPQEMMMLPTGPRERSEEEQDRSRGFRSYGGDRERGGGFDDERRPSRDSDLDMRSRADESDDWGKNKSFSPAPTDSGRRDRLSGASPLGRSDDIDNWSRDKKPLPSRYPSLGTGGGFRESPGGGFRESSGGGFRESSGGGFRESSGGGFRDSPGPSDSDRWVRGGVSAPTMTNNGDRPRLNLNPPKRDPSAAAVPAAEVTRSRPSPFGAAKPREEVLAEKGLDWRKMEGDIEKKTSRPTSSHSSRPNSAHSSRPGSPGSQVSAVGSEGAPRARPKVNPFGDAKPREVVLQEKGKDWRKIDLELEHRSINRPESEEEKNLKEEINLLKVDLKEIEAIVGDGSEQAKEVSEKISQMEKQLDLLTVELDDKIRFGQRPSSGAGRVAAFPPAGEEPHVAVAHMDRPRSRGGVETYPKPVEERWGFHGSRERGSFGGGGGSDRSSARQGW

SEQ ID NO: 3510 - protein, 526 aa, Zea mays; identical to SEQ ID NO: 1048

SEQ ID NO: 3511 - protein, 977 aa, Zea mays; identical to SEQ ID NO: 1049

SEQ ID NO: 3512 - protein, 982 aa, Oryza sativa Japonica Group
MRRHILVICLPLITLLSLSISSSCQSDHQIQTQALLQFKAGLTDPLNNLQTWTNTTSPCRFLGVRCDRRTGAITGVSLSSMNLSGRISPAIAALTTLTRLELDSNSLSGSVPAELSSCTRLRFLNLSCNGLAGELPDLSALAALDTIDVANNDLSGRFPAWVGNLSGLVTLSVGMNSYDPGETPASIGNLKNLTYLYLASSNLRGVIPESIFELAALETLDMSMNNLAGVIPAAIGNLRQLWKIELYGNNLTGELPPELGRLTGLREIDVSRNQLSGGIPPELAALEGFEVIQLYRNNLSGQIPAAWGELRSLKSFSAYENRFSGEFPANFGRFSPLNSVDISENAFSGPFPRHLCDGKNLQYLLALQNGFSGELPDEYSSCDSLQRFRINKNKLTGSLPAGLWGLPAVTIIDVSDNGFTGSISPAIGDAQSLNQLWLQNNHLDGEIPPEIGRLGQLQKLYLSNNSFSGEIPPEIGSLSQLTALHLEENALTGRLPGEIGGCARLVEIDVSRNALTGPIPATLSALSSLNSLNLSHNAITGAIPTQLVVLKLSSVDFSSNRLTGNVPPALLVIDGDVAFAGNPGLCVGGRSELGVCKVEDGRRDGLARRSLVLVPVLVSATLLLVVGILFVSYRSFKLEELKKRDMEQGGGCGAEWKLESFHPPELDADEICAVGEENLIGSGGTGRVYRLALKGGGGTVVAVKRLWKGDAARVMAAEMAILGKIRHRNILKLHACLSRGELNFIVYEYMPRGNLYQALRREAKSGGGAELDWPRRCKIALGAAKGLMYLHHDCTPAIIHRDIKSTNILLDDDYEAKIADFGIAKIAAEDSAEFSCFAGTHGYLAPELAYSMKVTEKTDVYSFGVVLLELITGRSPIDPAFGEGKDIVFWLSTKLAAESIDDVLDPRVAAVSSSSSAAAAARDREDMIKVLKVAVLCTAKLPAGRPTMRDVVKMLTDAGAGPCSPRGQPPAARACARSKSCC

SEQ ID NO: 3513 - protein, 987 aa, Oryza sativa Indica Group
MRRHILVICLPLITLLSLSISSSCQSDHQIQTQALLQFKAGLTDPLNNLQTWTNTTSPCRFLGVRCDRRTGAITGVSLSSMNLSGRISPAIAALTTLTRLELDSNSLSGSVPAELSSCTRLRFLNLSCNGLAGELPDLSALAALDTIDVANNDLSGRFPAWVGNLSGLVTLSVGMNSYDPGETPASIGNLKNLTYLYLASSNLRGVIPESIFELAALETLDMSMNNLAGVIPAAIGNLRQLWKIELYGNNLTGELPPELGRLTGLREIDVSRNQLSGGIPPELAALEGFEVIQLYRNNLSGQIPAAWGELRSLKSFSAYENRFSGEFPANFGRFSPLNSVDISENAFSGPFPRHLCDGKNLQYLLALQNGFSGELPDEYSSCDSLQRFRINKNKLTGSLPAGLWGLPAVTIIDVSDNGFTGSISPAIGDAQSLNQLWLQNNHLDGEIPPEIGRLGQLQKLYLSNNSFSGEIPPEIGSLSQLTALHLEENALTGRLPGEIGGCARLVEIDVSRNALTGPIPATLSALSSLNSLNLSHNAITGAIPAQLVVLKLSSVDFSSNRLTGNVPPALLVIDGDVAFAGNPGLCVGGRSELGVCKVEDGRRDGLARRSLVLVPVLVSATLLLVVGILFVSYRSFKLEELKKRDMEQGGGCGAEWKLESFHPPELDADEICAVGEENLIGSGGTGRVYRLALKGGGGTVVAVKRLWKGDAARVMAAEMAILGKIRHRNILKLHACLSRGELNFIVYEYMPRGNLYQALRREAKGGGCGAAAAELDWARRCKIALGAAKGLMYLHHDCTPAIIHRDIKSTNILLDDDYEAKIADFGIAKIAAEDSAEFSCFAGTHGYLAPELAYSMKVTEKTDVYSFGVVLLELVTGRSPIDPAFGEGKDIVFWLSTKLAAESIDDVLDPRVAAPSPSSSSSAAAARDREDMIKVLKVAVLCTAKLPAGRPTMRDVVKMLTDAGAGPCSPRGQPPAARACARSKSCC

SEQ ID NO: 3514 - protein, 987 aa, Oryza sativa Japonica Group
MRRHILVICLPLITLLSLSISSSCQSDHQIQTQALLQFKAGLTDPLNNLQTWTNTTSPCRFLGVRCDRRTGAITGVSLSSMNLSGRISPAIAALTTLTRLELDSNSLSGSVPAELSSCTRLRFLNLSCNGLAGELPDLSALAALDTIDVANNDLSGRFPAWVGNLSGLVTLSVGMNSYDPGETPASIGNLKNLTYLYLASSNLRGVIPESIFELAALETLDMSMNNLAGVIPAAIGNLRQLWKIELYGNNLTGELPPELGRLTGLREIDVSRNQLSGGIPPELAALEGFEVIQLYRNNLSGQIPAAWGELRSLKSFSAYENRFSGEFPANFGRFSPLNSVDISENAFSGPFPRHLCDGKNLQYLLALQNGFSGELPDEYSSCDSLQRFRINKNKLTGSLPAGLWGLPAVTIIDVSDNGFTGSISPAIGDAQSLNQLWLQNNHLDGEIPPEIGRLGQLQKLYLSNNSFSGEIPPEIGSLSQLTALHLEENALTGRLPGEIGGCARLVEIDVSRNALTGPIPATLSALSSLNSLNLSHNAITGAIPAQLVVLKLSSVDFSSNRLTGNVPPALLVIDGDVAFAGNPGLCVGGRSELGVCKVEDGRRDGLARRSLVLVPVLVSATLLLVVGILFVSYRSFKLEELKKRDMEQGGGCGAEWKLESFHPPELDADEICAVGEENLIGSGGTGRVYRLALKGGGGTVVAVKRLWKGDAARVMAAEMAILGKIRHRNILKLHACLSRGELNFIVYEYMPRGNLYQALRREAKGGGCGAAAAELDWARRCKIALGAAKGLMYLHHDCTPAIIHRDIKSTNILLDDDYEAKIADFGIAKIAAEDSAEFSCFAGTHGYLAPELAYSMKVTEKTDVYSFGVVLLELVTGRSPIDPAFGEGKDIVFWLSTKLAAESIDDVLDPRVAAPSPSSSSAAAAARDREDMIKVLKVAVLCTAKLPAGRPTMRDVVKMLTDAGAGPCSPRGQPPAARACARSKSCC

SEQ ID NO: 3515 - protein, 965 aa, Hordeum vulgare subsp. vulgare
MRKHILFCLQLTILVSLSVNSTCQTDPQTEALLQFKASLADPLNYLQTWTKATPPCQFLGVRCNAGLVTEISLSSMNLSGTISPSIAALRGLERLDLDTNSLSGTVPSELISCTQLRFLNISWNTLTGELPDFSALTVLESLDVANNGFSGRFPAWVGDMTGLVYLSMGCNNYDQGEMPPSIGNLKNLTYLYLSNCSLRGAIPDSVFELTLLETLDLSLNNLAGEIPRAIGNLRKVWKIELYKNSLTGELPPELGRLAELREIDASRNQLSGGIPAAFAKLKNLQVIQLYRNNLSGAIPAEWAELRSLKSFSVYENRFAGEFPANFGRFSSLGSVDISENGFTGPFPRHLCNGKSLQFLLALQNGFSGEVPEEYSACKTLQRFRINKNQLTGSIPERLWGLPAVTIIDVSDNGFTGTISPLIGEAQNLNQLWVQNNRLSGTIPAETGRLGQLQKLYLSNNSFSGTIPSQIGNLAQLTALHLEDNALGGALPADIGGCSRLVEIDVSRNELTGPIPASLSLLSSLNSLNMSRNAITGMIPAQLQALKLSSVDFSANRLTGSVPPGLLVIAGDEAFAGNPGLCVHGWSELGACNTDDHHRDGLARRSLVVLPVIVSVMVLLVVGILFVSYRSFKLEEQRRRDLEHGDGCEQWKLESFHPPELDADEICGVGEENLVGSGGTGRVYRLQLKDGGGTVAVKRLWKGDAARVMAAEMSILGTIRHRNVLKLHACLSRGELNFIVYEYMPRGNLYQALRREAKGGGGEPELDWPRRCKVALGAAKGLMYLHHDCTPAVIHRDIKSTNILLDEDYEAKIADFGIARVAAKNSEEFSCFAGTHGYLAPELAYSLKVTEKTDVYSFGVVLMELVTGRSPIDARFGEGKDIVFWLSSKLGTQRMDDVVDPRLAASSAKGKEEMLKVLRIAMLCTTKLPAGRPAMRDVVNMLTDACAGSCSPRGHPPVWSCSKSAC

SEQ ID NO: 3516 - protein, 965 aa, Hordeum vulgare subsp. vulgare
MRKHILFCLQLTILVSLSVNSTCQTDPQTEALLQFKASLADPLNYLQTWTKATPPCQFLGVRCNAGLVTEISLSSMNLSGTISPSIAALRGLERLDLDTNSLSGTVPSELISCTQLRFLNISWNTLTGELPDFSALTVLESLDVANNGFSGRFPAWVGDMTGLVYLSMGCNNYDQGEMPPSIGNLKNLTYLYLSNCSLRGAIPDSVFELTLLETLDLSLNNLAGEIPRAIGNLRKVWKIELYKNSLTGELPPELGRLAELREIDASRNQLSGGIPAAFAKLKNLQVIQLYRNNLSGAIPAEWAELRSLKSFSVYENRFAGEFPANFGRFSSLGSVDISENGFTGPFPRHLCNGKSLQFLLALQNGFSGEVPEEYSACKTLQRFRINKNQLTGSIPERLWGLPAVTIIDVSDNGFTGTISPLIGEAQNLNQLWVQNNRLSGTIPAETGRLGQLQKLYLSNNSFSGTIPSQIGNLAQLTALHLEDNALGGALPADIGGCSRLVEVDVSRNELTGPIPASLSLLSSLNSLNMSRNAITGMIPAQLQALKLSSVDFSANRLTGSVPPGLLVIAGDEAFAGNPGLCVHGWSELGACNTDDHHRDGLARRSLVVLPVIVSVMVLLVVGILFVSYRSFKLEEQRRRDLEHGDGCEQWKLESFHPPELDADEICGVGEENLVGSGGTGRVYRLQLKDGGGTVAVKRLWKGDAARVMAAEMSILGTIRHRNVLKLHACLSRGELNFIVYEYMPRGNLYQALRREAKGGGGEPELDWPRRCKVALGAAKGLMYLHHDCTPAVIHRDIKSTNILLDEDYEAKIADFGIARVAAKNSEEFSCFAGTHGYLAPELAYSLKVTEKTDVYSFGVVLMELVTGRSPIDARFGEGKDIVFWLSSKLGTQRMDDVVDPRLAASSAKGKEEMLKVLRIAMLCTTKLPAGRPAMRDVVNMLTDACAGSCSPRGHPPVWSCSKSAC

SEQ ID NO: 3517 - protein, 778 aa, Zea mays; identical to SEQ ID NO: 1050

SEQ ID NO: 3518 - protein, 787 aa, Sorghum bicolor
MATTITRLLHHLALFLLLVQFADAVLTPKTKNHAALKPQSTTSTTYIVHANDLAKPPHFRSLEDWYRSMVSTHASSTRAASSSGILYTYDTVMHGFAVQLTGDEARLMSSAPGVIGVYENRVLYPQTTRSPGFMGLEPGNGAWKQTDFGDGVIIGIIDGGIWPESASFHDGGLGPVRPSWKGKCVDAHDFNANLCNNKLVGAKAFVNAADAMAGRRKSRGIVPSPRDEDGHGTHVASTAAGAEVGNASLHTFSRGTAWGMAPKARIAMYKACGEVGCLFADIVAAVDAAVKDGVDIISMSLGGIPPDPPFHDDVVAIALFGAELKGVFVVLAGGNDGPQASTVTNSAPWMTTVGAATVDRLFPASLTLGNGVVLAGQSLYTMHAKGTPMIQLLSADCRRPDELKSWTPDKVMGKIMVCTKGASDGHGFLLQNAGGAGIVGVDADEWSRDGSATYSFTLPGLTLSYTAGEKLRAYMASVPYPVASFSFGCETIVRKNRAPVVAGFSSRGPNPVVPELLKPDVVAPGVNILAAWSGDASVSGYSDVDDGRRADYNIISGTSMACPHVAGVAALIMNKHPNWTPAMVRSALMTTAGTVDNRGGDILDNGVTVGRTGNGNARIATPLVAGAGHVQPDLALDPGLVYDARERDYVDFLCALNYTAEQMRRFVPDFVNCTGTLAGGPAGLNYPSFVVAFDSRTDVRTLMRTLTKVSEEAETYNVTVLAPEHVKVTVSPTTLEFKEHMEARSYTVEFRNEAGGNREAGEWDFGQISWASGKHQVRSPVAFQWKN

SEQ ID NO: 3519 - protein, 902 aa, Oryza sativa Japonica Group
MAPPRTSGLLLLLAAVVAAAAVVLVPPAEAAVASIDLGSEWLKVAAVHLAPGRVPIAVAINEMSKRKSPALAALADGNRLAGEEASGITARHPSKVFARARDLLAKPFPYVRSVAEALFLPYDLVPDARGAAAVRADDGQVYTVEEIVAMVLHYAAGLADAHVGAPVRDAVVAVPPYFGQAERRALTQAAQLAGVNVLALINEHAGAALQYGIDKDFSNESRHVIFYDMGAGSTYAALVYYSAYKAKEFGKTVSVNQFQVKDVRWDSKLGGLEMEMRLVNYFADQFNKQLGNGVDIRQSPKAMAKLKKQVKRTKEILSANTAAPISVESLYNDLDFRSTITREKFEELCEELWEQALTPVKEVLAHSGMKIDDIYAVELIGGATRVPKLQAKLQEFLGRSDLDKHLDADEAIVLGASLHAANLSDGIKLNRKLGMIDGSTYGFVFEINGPDYVKDESTDQLLVPRMKKLGIKMFRSIRHTKDFDVSISYEKASELPPGVTSHKFVEYSVSGLTDASEKYSSRNLSAPIKANLHFSLSRSGIISLDRAEAVIEITEWVEVPKKNLTLESNSTSQTLSSEGGAANDTSDSKENVSSDGDANKSSAPIDESNAQDIVTEKVLKKRTFRVPLKVVEKMAGAGSILSKELYSEAKTRLEALDKKDAERRRTAELKNNLESYIYSMKEKLEENTEILTVSTEQERESFAEKLNEVQDWLYMDGEDAQANEFKERLDQLKAIGDPILFRLSELKARPTACENARLYLAELQKIVKNWDSNKPWLPKKRVDEVVSEAEKVKTWLEEKEAIQKSTPVYSPPAFTSEEVYEKVLDLQDKVSSVNRIPKPKPKIEKKPPKEEESANKEKTDSSESESKEAESTETSSESAAPEESQSEPQKTDDLEPEAHDEL

SEQ ID NO: 3520 - protein, 376 aa, Sorghum bicolor
MASEVEDDAAAAGAPLVANGAADVRRRRDQAKAILSKQAVKIATKAEQHDSFIFKVTHLLGVLGFGGFCYLLGARPQDVPYVYCLFYIIFVPLRWIYYRYKKWHYYLLDFCYYANTFLLVMILFYPKDEKLFMVCFSFAEGPLAWALIVWRCSLVFSSFDKLVSVLIHLLPGIVLFTIRWWNPQTFAAMHPEGRDARDTWPYVEHKSYLWTWLFFVPLAAYTLWQLMYFLIVNVLRRQRLLRDPEVMTSYRELSKKAQKANNIWWRLSGLLGDRNRQVMYILLQALFTVATMALTVPIFLSYRMHVVFLILKVCASTWNGGSFILEVMPRQVVQKQQKKKLDMKPIEQGSSTQSAPGDDGTLGNHHHHTSEEQIQE

SEQ ID NO: 3521 - protein, 373 aa, Zea mays
MASEVEDEAATPLLANGAADVRRRRDQAKAILSTQAVRIATKAEQHERFIFKVTHLLGVLGFGGFCYLLGARPQDVPYVYCLFYVIFVPLRWIYYRYKKWHYYLLDFCYYANTFLLVMILFYPEDEKLFMVCFSFAEGPLAWALIVWRCSLVFSSFDKLVSVLIHLLPGIVLFTIRWWNPQTFAAMHPEGRDARVTWPYVEDKSYLWTWLFFVPLAAYTLWQLMYFLIVNVLRRQRLLRDPEVMTSYRELSKKAQKANNIWWRLSGLLGDRNRQVMYILLQALFTVATMALTVPIFLSYRMHVVFLILKVCASTWNGGSFILEVMPRQVVQKQLKKLDMKPMEQGSSTQGAPGGDGGTLGNHHQHTSEEHIQE

SEQ ID NO: 3522 - protein, 371 aa, Oryza sativa Japonica Group
MASEVEDDAAAVLTNGGAGAAEVRRRRDQAKEILSKQAVKIATKAEEHERFIFKVTHLLGVLGFGTFCYLLGARPQDVPYVYCLFYVIFVPLRWIYYRYKKWHYYLLDFCYYANTFLLVMILFYPKDEKLFMVCFSFAEGPLAWALIVWRCSLVFSSFDKLVSVLIHLLPGIVIFTIRWWNPQTFAAMHPEGRAARVTWPYVEDKSYLWTWLFAVPLAAYTLWQLMYFLIVNVLRRQRLLKDPEVMTSYRELSKKAQKANNIWWRLSGLLGDRNRPLMYILLQALFTVATMALTVPIFLSFQMHVVFQILKVCASTWNGGSFILEVMPRQVVQKEKKKLEMKPMEEANSSQNAEESQGDLSANGQHSSEHS

SEQ ID NO: 3523 - protein, 391 aa, Oryza sativa Japonica Group
MASEVEDDAAAVLTNGGAGAAEVRRRRDQAKEILSKQAVKIATKAEEHERFIFKVTHLLGVLGFGTFCYLLGARPQDVPYVYCLFYVIFVPLRWIYYRYKKWHYYLLFSYGYYNREEALQFQAIDCLDFCYYANTFLLVMILFYPKDEKLFMVCFSFAEGPLAWALIVWRCSLVFSSFDKLVSVLIHLLPGIVIFTIRWWNPQTFAAMHPEGRAARVTWPYVEDKSYLWTWLFAVPLAAYTLWQLMYFLIVNVLRRQRLLKDPEVMTSYRELSKKAQKANNIWWRLSGLLGDRNRPLMYILLQALFTVATMALTVPIFLSFQMHVVFQILKVCASTWNGGSFILEVMPRQVVQKEKKKLEMKPMEEANSSQNAEESQGDLSANGQHSSEHS

SEQ ID NO: 3524 - protein, 391 aa, Oryza sativa Indica Group
MASEVEDDAAAVLTNGGAGAAEVRRRRDQAKEILSKQAVKIATKAEEHERFIFKVTHLLGVLGFGTFCYLLGARPQDVPYVYCLFYVIFVPLRWIYYRYKKWHYYLLFSYGYYNREEALQFQAIDCLDFCYYANTFLLVMILFYPKDEKLFMVCFSFAEGPLAWALIVWRCSLVFSSFDKLVSVLIHLLPGIVIFTIRWWNPQTFAAMHPEGRAARVTWPYVGDKSYLWTWLFAVPLAAYTLWQLMYFLIVNVLRRQRLLKDPEVMTSYRELSKKAQKANNIWWRLSGLLGDRNRPLMYILLQALFTVATMALTVPIFLSFQMHVVFQILKVCASTWNGGSFILEVMPRQVVQKEKKKLEMKPMEEANSSQNAEESQGDLSANGQHSSEHS

SEQ ID NO: 3525 - protein, 372 aa, Hordeum vulgare subsp. vulgare
MASSEVVEDEASASAAAKLANGAADVRRRRDQAKALLSKQAVKIATKAEEHERFIFKVTHLMGVLGFGTFCYLLGARPQDVPYVYCLFYVIFVPLRWIYYRYKKWHYYLLDFCYYANTFLLVMILFYPKDEKLFMVCFSFAEGPLAWALIVWRCSLVFSSFDKLVSVLIHLLPGIVLFTIRWWNPQTFAAMHPEGRAARVTWPYVEDKSYLWTWLFVVPLAAYTLWQLMYFLIVNVLRRQRLLRDPEVMTSYRELSKKAQKANNIWWRLSGLLGDKNRPLMYILLQALFTVATLAFTVPIFLSYRLHGIFQVLKVCAATWNGGSFILEVMPRQVVQKEKKRLEMKPIEQANLKEHMDGPSGDHQHASEEPSQ

SEQ ID NO: 3526 - protein, 408 aa, Vitis vinifera
MASNEEAVEEANGDSFLAVKQRLRDRSKKVAQTKEMLSKQAVQTKEILSKQAVKIAKQAEEHERFINKVTHLLGVLGFGAFCFLLGARPQDIPYVYCLFYFTFVPLRWIYYRFKKWHYYLLDFCYYANTIFLVVLLLYPKNEKLFMVCFSFAEGPLAWALIVWRCSLVFSSVDKIVSVLIHLLPGIVFFTIRWWNPTTFEAMHPEGTAHRASWPYVENKSYLWTWLFVVPLAAYTLWQVLYFLIVNVLRRQRLLRDPEVMTSYRELSKKAQKANNIWWRLSGLLGDQNRLLMYILFQGVFTVATTALTVPIFLSYEMHVVFQILKVSATVWNGGSFLLEVMPRQVILKEKKKSETQPVQTLLVPSAETNQPDQPPLVDYLKENGSQQDQSSLVETSEEMNSSAEPHPS

SEQ ID NO: 3527 - protein, 363 aa, Glycine max
MSDTEDHAASEYSNGDESPPKPRQRFRDRSKEMLSKQAVQTKQMLSKQAVKIAKQAEEHERFINKVTHLVGVLGFGGFCFLLGARPQDIPYVYCLFYVIFVPLRWIYYRFKKWHYYLLDFCYYANTIFLVDLLFYSSNEKLFMVCFSFAEGPLAWALIVWRCSLVFSSVDKIVSVLIHLLPGLVFFTIRWWNPATFEAMHPEGTARRPTWPYVEDKSYLWTWLFLVPLVAYTLWQVLYFLIVNVLRRQRFLRDPEVMTSYRELSKKAQKASNIWWRLSGLLGDQNRMLMYIFLQGIFTVATMALTVPIFLSYELHVVFQILKVSASIWNGGSFLLEVMPRQAILKEKKKSEMQPVEEAQSNHQ

SEQ ID NO: 3528 - protein, 391 aa, Ricinus communis
MSNNEDPINEFVSNGDSFEKVKQRLKDRSKKVAQTKEILSKQANQTKEILSKQAVKIAKQAEEHESFINKVTHLLGVLGFGGFCFLLGARPQDIPYVYCLFFFIFVPLRWIYYRFKKWHYFLLDFCYYANTIFLVDLLLYPKDEKLFMVCFSFAEGPLAWALIVWRCSLVFSSVDKIVSVLIHLLPGLVFFTIRWWNPATFEAMHPEGTSGRASWPYVEDKSFLFTWLFLVPLVAYFLWQLLYFLIVNVLRRQRLLRDPEVMTSYRELSKKAQKANNVWWRLSGLLGDQNRMLMYILLQALFTVATTALTVPIFLSYELHAVFQILKVSAAVWNGGSFLLDVMPRQVILKEKKKSELQPAHIQQYHSEPKQDQSPNSMEIRMKTIHSAEEQ

SEQ ID NO: 3529 - protein, 338 aa, Zea mays
MVVLTKGELEQIALPAVQRASPPPPAAVPEVDLAAGDAAAARAVAKACEDHGFFKVTGHGVPQHLLARLEAAAAAFFALPQREKDRAAGCPFGYASKRIGANGDLGWVEYLLLAVTAAGAAAAPVSACEGAEPPCFRAVLDEYVAAVRRMTCTVLQLMAQGLGLDDRDVFSRLVLDRDSDSMLRVNHYPPRPQPAAAAETRRLTGFGEHTDPQIISVLRSNDASGLEITLRDGTWVSVPSDTESFFVNVGDALQVLTNGRFRSVRHRVMVSSARPRVSVIFFGGPPPRERLAPLPGLVDREGGRRRYREFTWREYKNSAYRTKLADNRLCSFETMATS

SEQ ID NO: 3530 - protein, 349 aa, Hordeum vulgare subsp. vulgare
MVVLAKGELEQIALPAVHKTAPPLADLPEVDLSVARSGSEGRAAAARAVAAACEEHGFFKVTGHGVPAELLARVENAAAAFFALSQRDKEAAMSAATPGSPFGYASKRIGNNGDLGWVEYLLLGVTAAGAEAGAPLSVPEEVVPSASLCSFRDLLNEYTVAVRRMTCQLLELMAEGLGMEDRDAFTRLVLHKESDSMLRVNHYPPRPELKQHHGGRVTGFGEHTDPQIISVLRSNATSGLEIALRDGDWVSVPPDQTSFFVNVGDALQVLTNGRFRSVRHRVMVNNIQPRVSVIFFGGPPPRETLAPLPQLVGEGGRSRYKEFTWCEYKASAYGTKLAANRLCHFETTN

SEQ ID NO: 3531 - protein, 390 aa, Oryza sativa Japonica Group; identical to SEQ ID NO: 2750

SEQ ID NO: 3532 - protein, 783 aa, Zea mays; identical to SEQ ID NO: 1051

SEQ ID NO: 3533 - protein, 978 aa, Sorghum bicolor; identical to SEQ ID NO: 1053

SEQ ID NO: 3534 - protein, 464 aa, Sorghum bicolor; identical to SEQ ID NO: 2966

SEQ ID NO: 3535 - protein, 447 aa, Hordeum vulgare subsp. vulgare
MGTQAAENVDPPAKDVRTDEQKKIDDWLPITSSRNAKWWYSAFHNVTAMVGAGVLSLPFAMSELGWGPGIAVLIISWVITLYTLWQMVEMHEMVPGKRFDRYHELGQHALGDKLGLWIVVPQQLIVEVGVNIVYMVTGGRSLKKFHDVICDGKCKDIKLSFFIMIFASVHFVLSQLPNFNSISGVSLAAAVMSLSYSTIAWGASVDKGKMVNVDYNLRATTMPGKVFGFFGALGEVAFAYAGHNVVLEIQATIPSTPEKPSKKPMWKGVVVAYIVVALCYFPVALIGYWAFGNSVDDNILITLNKPKWLIAMANMMVVIHVIGSYQIYAMPVFDMIETVLVKKLRFPPGLTLRLIARSLYVAFTMFVAITFPFFGGLLGFFGGFAFAPTTYFLPCIMWLAIYKPKRFSLSWCTNWVCIVLGVCLMILSPIGGLRQIIMDSKTYKFYS

SEQ ID NO: 3536 - protein, 200 aa, Zea mays
  misc_feature (133)..(133): Xaa can be any naturally occurring amino acid
  misc_feature (150)..(150): Xaa can be any naturally occurring amino acid
  misc_feature (172)..(172): Xaa can be any naturally occurring amino acid
MGSYHYTSQFVDSNPKPSHKPKTTVQIPIKSPREGSPDAVAAAKIQAALRGYLVRRHVTAVRAADAEATRLERLLRRQETVDAVRSDERERARFSEALMAVLLRLDAVPGHYPAVRDARRAVSRRVVGLQEVXDAVAVAPKAQTCGVPAXLEQVLQLIWGVGEAPAPVPPPXAEVEEEVRRAGSCWARFFWWSVVSSVRS

SEQ ID NO: 3537 - protein, 209 aa, Sorghum bicolor
MGSYHHYTSTSQFVFAAVDSNPNPEPSHKPRTTVQIPITSPPPPEGARERSPDAVAAAKIQAALRGYLVRRHVTAVRAADAEATRLERLLRRQETVDAVRRDERERARFSEALMAVLLRLDAVPGHYPAVRDARRAVSRRVVGLQEVFDAVVAAPDAQTCGVPASLEQVLEGIWGVGEAPVPVPPPAATAVEEEVRRAGSCWGRFFGGV

SEQ ID NO: 3538 - protein, 213 aa, Zea mays
  misc_feature (136)..(136): Xaa can be any naturally occurring amino acid
  misc_feature (157)..(157): Xaa can be any naturally occurring amino acid
  misc_feature (178)..(178): Xaa can be any naturally occurring amino acid
MGSHHHYTSASQFVFAAVDSNPNPRPSYSHKPKTTVQIPITSLPERARAGPPDAAAAAKIQAALRGYLVMRHAAAVRGADAEATRLERLLRRQETVDAVRGDERERARFSEALMAVLLRLDAVPGRYPAVRDARRXVSRRVVGLQEVFDAVVAAPAXQTCGVPASLEQVLEGIWGIGXAPVPVPPAQAMAAVEEEVRRGGSYWARFFGGVGWP

SEQ ID NO: 3539 - protein, 492 aa, Zea mays; identical to SEQ ID NO: 1030

SEQ ID NO: 3540 - protein, 369 aa, Zea mays
MSDHRAKRPSDGAATVASPAAKRARDPPAPALPTNKEAPDMAPKTRIFCDILASRADDEELNAELDKADIRVSIADVEQVLRFSYAHPRAAAAFFRWAGYRYLGHEHSPYSWNLLVDILGKNRLFEPMWDTVKSMQSQQLLSLATFASIFSSLAATPGGSPLKAFMDMPRYGMTRDTPALNSLLSALCRANRLDDARAAIPVARAEAGTRPDADSYAILLEGSEAAADLRVAREVFDEMVQAIGFYPDNVPAYDSFLTTLVSSDSSTALPEAMEYLNVLSRHGCSPGEKFFRAALAAHLDARQLRGAMNLWDDFVGRRGLVPDMEMYNTMIKLQGSLGHAELIVGYLDDMISNGVFPDTNTYNVVLQLL

SEQ ID NO: 3541 - protein, 268 aa, Zea mays; identical to SEQ ID NO: 1055

SEQ ID NO: 3542 - protein, 241 aa, Zea mays
MSTTTTTMKASDPGSAWFGSGARAPAAAAGTGHNVRLITTAVAAFVSVLGLALFLHLYVCHVRRRNRRRAAAIAAALPTTAAAPAPKGGLDPAAIAALPTTLYRNDAAEAGAGSDECTICLGAVQDGEVVRALPACGHVFHVPCVDTWLASSSSCPVCRAEVEPPPPTAVGSARFVQEKVQDAVKQEAGSSTPDRGIGACASLIKMLSRERPAPRRPQGAYADAGDLDDLERQQYAVAVNN

SEQ ID NO: 3543 - protein, 249 aa, Sorghum bicolor
MATTTTTTTTMKASDPGSAWFGSGASRTPSAAGTGGHNARLITTAVAAFVSVLGLALFLHLYVCHVRRRNRRRAEAARAAVLPTTAAAPAKCGLDAAAIAALPTTIYRDDVGGEAATDECTICLGAVEDGEVVRALPACGHVFHVPCVDTWLASSSSCPVCRAEVEPPPPTATVGSARFVLEKVQDAVKEEAGSCSSTPERGIGACASLMKMLSRERPAAPRRPQQGAYADAGDLDDLERQQYAVAVNN

SEQ ID NO: 3544 - protein, 238 aa, Zea mays
MSTTTMKASDPGSAWFGSGARTRSAAGISHNARLVTTAVAAFVSVLGLALFLHLYVCHVRRRNRRRAAAVLPTTTAAAAAAAAPKRGLDPAAVAALPTVLYRDAGGADDGAECTICLGAVQEGELVRALPACGHVFHVPCVDTWFASSSSCPVCRAEVEPPPPPPALSSSARFVQAEKAAQDAVKEEAGSSTPERGIGACASLMKMLSRERPAPRRPHADAGDLDDLERQQHSVAVNN

SEQ ID NO: 3545 - protein, 237 aa, Zea mays
MSTTTTKASDPGSAWFGSGARTRSAAGISHNARLVTTAVAAFVSVLGLALFLHLYVCHVRRRNRRRAAAVLPTTTAAAAAAAAPKRGLDPAAVAALPTVLYRDAGGADDGAECTICLGAVQEGELVRALPACGHVFHVPCVDTWFASSSSCPVCRAEVEPPPPPALSSSALFVQAEKVVQDAVKEEAGSSTPERGIGACASLMKMLSRERPAPRRPHADAGDLDDLERQQHSVAVNN

SEQ ID NO: 3546 - protein, 247 aa, Oryza sativa Indica Group
MADDVAPRTASAYLDPSYWDERFGKEEHYEWFKDFSHFRHLLAPLLSPSISVLEVGCGNSRLGEELLREGVAGGITCVDLSPVAVQRMRDRLAEQGTEGVEVVVADMLDLPFDRESFDLVIEKGTMDVLFVDSGDPWNPNPTTVDNVMKMLEGIHKVLKPEGIFVSITFGQPHFRRRFFEAPGFTWSVEWSTFGDGFHYFFYILKKGKRLLDSNVNQHTQPAAPSINMFHEELESEDYIFRTNVDEL

SEQ ID NO: 3547 - protein, 247 aa, Oryza sativa Japonica Group
MADDVAPRTASAYLDPSYWDERFGKEEHYEWFKDFSHFRHLLAPLLSPSISVLEVGCGNSRLGEELLREGVAGGITCVDLSPVAVQRMRDRLAEQGTEGVEVVVADMLDLPFDRESFDLVIEKGTMDVLFVDSGDPWNPNPTTVDNVMKMLEGIHKVLKPEGIFVSITFGQPHFRRRFFEAPGFTWSVEWSTFGDGFHYFFYILKKGKRLLDSNGNQHTQPAAPSINMFHEELESEDYIFRTNVDEL

SEQ ID NO: 3548 - protein, 247 aa, Hordeum vulgare subsp. vulgare
MADDVAPCTASGYLDPSYWDGRFGKEEHYEWFKDFSHFRHLLAPLLSPSLSVLEVGCGNSRLGEELLREGVAGGVTCIDLSPVAVQRMRDRLAEQGTTGVDVVVADMLDLPFESESFDLVIEKGTMDVLFVDSGDPWNPNPTTVDNVTKMLEGIHKVLKPDGKFVSITFGQPHFRRRFFEAPELTWSVEWNTFGDGFHYFFYILQKGKRSPESTGHQVTLPAAPSFNMLHDELESEDYLFRTNVDEL

SEQ ID NO: 3549 - protein, 252 aa, Zea mays
MAACDDDVAPSTASAYLDPSYWDARFGKEEHYEWFKDFSHFRHLLAPLLSPSLSVLEVGCGNSRLGEDLLREGVAGGITCVDLSPVAVQRMRDRLAALGTKGVDAVVADMLDLPFEQESFDLVIEKGTMDVLFVDSGDPWDPNPTTVENVMKMLNGIHRVLKPEGIFVSIAFGQPHFRRRFFEAPEFTWSIEYSTFGDSFHYFFYTLKKGKRSLESSSYQNTLPSPVAPRINMVHEELESEDFIFLTNLDGL

SEQ ID NO: 3550 - protein, 231 aa, Sorghum bicolor
MAASADDVAPSTASAYLDPSYWDARFGKEEHYEWFKDFSHFRHLLAPLLSPSLSVRDTSSLTCVDLSPIAVQRMRDRLATQGTKGVDVVVADMLDLPFEQESFDLVIEKGTMDVLFVDSGDPWDPNPTTVDNVMKMLKCIHRVLKPEGVFVSITFGQPHFRRRFFEAPEFTWSVEYSTFGDGFHYFFYTLKKGKRSPESSSYQNTLPAAPKLNMVHEELENEDFIFLTNLD

SEQ ID NO: 3551 - protein, 543 aa, Zea mays
MAHARSSHRRTGLLLAMAVVVVASLIAAADASSFGFDLHHRFSPVVRRWAEARGGPLAADQWPARGTPEYYSALSRHDRARRALAGGADDGLLTFAAGNDTYQSGTLYYAEVELGTPNATFLVALDTGSDLFWVPCDCRQCATIPSANGTGQDAPSLRPYSPRRSSTSKQVACDNPLCGQRNGCSAATNGSCPYEVQYVSANTSSSGVLVQDVLHLTRERPGPGAAGEALQAPVVFGCGQVQTGAFLDGGGGAVDGLMGLGMGKVSVPSALAASGLVASDSFSMCFGDDGVGRVNFGDAGSRGQAETPFTVRSLNPTYNVSFTSIGVGSESVAAEFAAVMDSGTSFTYLSDPEYTQLATKFNSQVSERRVNFSSGSADPFPFEYCYRLSPNQTEVAMPDVSLTAKGGALFPVTQPFIPVGDTTGRAVGYCLAIMRNDMAIGIDIIGQNFMTGLKVVFDRERSVLGWEKFDCYRNARVADAPDGSPGPSSAPAAGPTKITPRQNDGSGSGYPGAAPLPRSAGSRNAAAALGLGCLYLLLAAALV

SEQ ID NO: 3552 - protein, 545 aa, Zea mays
MAHARYSHRRTGLLLAVAVAVVVVASLVAAADASSFGFDLHHRFSPVVRRWAEARGGPLAADRWPARGTPEYYSALSRHDRARRALAGGADDGLLTFAAGNDTYQSGTLYYAEVELGTPNATFLVALDTGSDLFWVPCDCRQCATIPSANATGPDAPPLRPYSPRRSSTSEQVACDNPLCGRRNGCSAATNGSCPYEVQYVSANTSSSGVLVQDVLHLTRERPGPGAAGEALQAPVVFGCGQVQTGAFLDDGGGAVDGLMGLGMGKVSVPSALAASGLVASDSFSMCFGDDGVGRVNFGDAGSRGQAETPFTVRSLNPTYNVSFTSIGIGSESVAAEFAAVMDSGTSFTYLSDPEYTQLATKFNSQVSERRVNFSSGSADPFPFEYCYRLSPNQTEVAMPDVSLTAKGGALFPVTQPFIPVGDTTGRAIGYCLAIMRNDMAIGIDIIGQNFMTGLKVVFDRERSVLGWEKFDCYRNARVADAPDGSPGPSSAPAAGPTKITPRQNDGSGSGYPGAAPLPRSAGSRNAAAALGLGCLYLLLAAALV

SEQ ID NO: 3553 - protein, 541 aa, Sorghum bicolor
MAQANSNHRCTGLLVAVAIVAVSFLVAAGDASSVGFDLHHRFSPVVRQWAEARGHPFAAQDWPARGSPEYYSALSRHDRAVLSRRALADGADGLVTFAAGNDTLQYIGSLYYAVVEVGTPNATFLVALDTGSDLFWVPCDCKQCASIANVTGQPATALRPYSPRESSTSKQVTCDNALCDRPNGCSAATNGSCPYEVQYLSANTSTSGVLVQDVLHLTRERPGAAAEAGEALQAPVVFGCGQVQTGTFLDGAAFDGLMGLGRENVSVPSVLASSGLVASDSFSMCFGDDGVGRINFGDSGSSGQGETPFTGRRTLYNVSFTAVNVETKSVAAEFAAVIDSGTSFTYLADPEYTELATNFNSLVRERRTNFSSGSADPFPFEYCYALGPNQTEALIPDVSLTTKGGARFPVTQPVIGVASGRTVVGYCLAIMKNDLGVNFNIIGQNFMTGLKVVFDREKSVLGWEKFDCYKNARVADAPDGSPSPAPAADPTKITPRQNDGSSNGFPAAAPLPRSAGSRNAAASALGAGGLSLLMLVAATLV

SEQ ID NO: 3554 - protein, 1001 aa, Hordeum vulgare subsp. vulgare
MAHLQLTAVAGGRDDEMEEVALLGSYGEPEGLSSRTGQEEEEEEDAGMRRAQVRVTGMTCSACTGAVEAALSARRGVRSAAVSLLQNRAHVVFDPALAKEEDIVEAIEDAGFEAEILPDSAVSQPKSQKALSGQFRIGGMTCAACVNSVEGILKKLPGVNRAVVALATSLGEVEYDPAAISKDEIVQAIEDAGFEAALLQSSEQDKALLGLIGLHTERDVNLLYDILRKTEGLRQFDVNSVRAEVEITFDPEVVGLRSIVDIIEIESSGRLKAHVQNPYVRSSSNDAQEASKMLHLLRSSLFLSIPVFFMRMVCPHISFINSFLLMHCGPFRIGDLLKWMLVSVVQFVVGKRFYVAAYRALRHGSTNMDVLVVLGTTATYVYSVCALLYGAFTGFHPPMYFETSAMIITFVLLGKYLEVLAKGRTSDAIKKLVELVPATAILLLKYKDGKYAGEKEIDALLIQPGDVLKVLPGSKIPADGIVTWGTSHVDESMVTGESASISKEVSSSVIGGTMNLNGTLHIQAAKVGSGTVLSQIISLVETAQMSKAPIQKFADYVAGIFVPIVITLSLLTFCTWFVCGTLGAYPNSWVSETSNCFVFSLMFSISVVVIACPCALGLATPTAVMVATGVGANHGVLVKGGDALERAQNVKYIIFDKTGTLTQGKATVTTTKVFSGMDVGDFLTLVASAEASSEHPLAKAILDYAFHFHFFGKLPSSKDDVKKRKEDAFSQWLLEVADFSALPGKGVQCLINGKMILVGNRALISENGVNIPEEAESFLVDMELNAKTGILVAYDGDFIGLMGVTDPLKREAAVVIQGLKKMGIYPVMVTGDNWRTALAVAKEIGIEDVRAEVMPAGKADVIRSLQKDGSVVAMVGDGINDSPALAAADVGMAIGAGTDIAIEAADYVLVRNNLEDVITAIDLSRKTFSRIRWNYFFAMAYNIVAIPVAAGALFPLIGLQMPPWLAGACMAFSSVSVVCSSLLLRRYRKPRLTTVLQITVE

SEQ ID NO: 3555 - protein, 1001 aa, Hordeum vulgare subsp. vulgare
MAHLQLTAVAGGRDDEMEEVALLGSYGEPEGLSSRTGQEEEEEEDAGMRRAQVRVTGMTCSACTGAVEAALSARRGVRSAAVSLLQNRAHVVFDPALAKEEDIVEAIEDAGFEAEILPDSAVSQPKSQKALSGQFRIGGMTCAACVNSVEGILKKLPGVNRAVVALATSLGEVEYDPAAISKDEIVQAIEDAGFEAALLQSSEQDKALLGLIGLHTERDVNLLYDILRKTEGLRQFDVNSVRAEVEITFDPEVVGLRSIVDIIEIESSGRLKAHVQNPYVRSSSNDAQEASKMLHLLRSSLFLSIPVFFMRMVCPHISFINSFLLMHCGPFRIGDLLKWMLVSVVQFVVGKRFYVAAYRALRHGSTNMDVLVVLGTTATYVYSVCALLYGAFTGFHPPMYFETSAMIITFVLLGKYLEVLAKGRTSDAIKKLVELVPATAILLLKYKDGKYAGEKEIDALLIQPGDVLKVLPGSKIPADGIVTWGTSHVDESMVTGESASISKEVSSSVIGGTMNLNGTLHIQAAKVGSGTVLSQIISLVETAQMSKAPIQKFADYVAGIFVPIVITLSLLTFCTWFVCGTLGAYPNSWVSETSNCFVFSLMFSISVVVIACPCALGLATPTAVMVATGVGANHGVLVKGGDALERAQNVKYIIFDKTGTLTQGKATVTTTKVFSGMDVGDFLTLVASAEASSEHPLAKAILDYAFHFHFFGKLPSSKDDVKKRKEDAFSQWLLEVADFSALPGKGVQCLINGKMILVGNRALIPENGVNIPEEAESFLVDMELNAKTGILVAYDGDFIGLMGVTDPLKREAAVVIQGLKKMGIYPVMVTGDNWRTALAVAKEIGIEDVRAEVMPAGKADVIRSLQKDGSVVAMVGDGINDSPALAAADVGMAIGAGTDIAIEAADYVLVRNNLEDVITAIDLSRKTFSRIRWNYFFAMAYNIVAIPVAAGALFPLIGLQMPPWLAGACMAFSSVSVVCSSLLLRRYRKPRLTTVLQITVE

SEQ ID NO: 3556 - protein, 912 aa, Hordeum vulgare subsp. vulgare
NGPDSVCCIQEEDIVEAIEDAGFEAEILPDSAVSQPKSQKALSGQFRIGGMTCAACVNSVEGILKKLPGVNRAVVALATSLGEVEYDPAAISKDEIVQAIEDAGFEAALLQSSEQDKALLGLIGLHTERDVNLLYDILRKTEGLRQFDVNSVRAEVEITFDPEVVGLRSIVDIIEIESSGRLKAHVQNPYVRSSSNDAQEASKMLHLLRSSLFLSIPVFFMRMVCPHISFINSFLLMHCGPFRIGDLLKWMLVSVVQFVVGKRFYVAAYRALRHGSTNMDVLVVLGTTATYVYSVCALLYGAFTGFHPPMYFETSAMIITFVLLGKYLEVLAKGRTSDAIKKLVELVPATAILLLKYKDGKYAGEKEIDALLIQPGDVLKVLPGSKIPADGIVTWGTSHVDESMVTGESASISKEVSSSVIGGTMNLNGTLHIQAAKVGSGTVLSQIISLVETAQMSKAPIQKFADYVAGIFVPIVITLSLLTFCTWFVCGTLGAYPNSWVSETSNCFVFSLMFSISVVVIACPCALGLATPTAVMVATGVGANHGVLVKGGDALERAQNVKYIIFDKTGTLTQGKATVTTTKVFSGMDVGDFLTLVASAEASSEHPLAKAILDYAFHFHFFGKLPSSKDDVKKRKEDAFSQWLLEVADFSALPGKGVQCLINGKMILVGNRALISENGVNIPEEAESFLVDMELNAKTGILVAYDGDFIGLMGVTDPLKREAAVVIQGLKKMGIYPVMVTGDNWRTALAVAKEIGIEDVRAEVMPAGKADVIRSLQKDGSVVAMVGDGINDSPALAAADVGMAIGAGTDIAIEAADYVLVRNNLEDVITAIDLSRKTFSRIRWNYFFAMAYNIVAIPVAAGALFPLIGLQMPPWLAGACMAFSSVSVVCSSLLLRRYRKPRLTTVLQITVE

SEQ ID NO: 3557 - protein, 998 aa, Zea mays
MAHLQLTALAGGADDEMEEVALLGSYDEEAGVGPEAEGDRAEAGMRRVQVRVTGMTCSACTGAVEAALSARRGVRRAAVSLLQNRAHVVFDPALAKEDDIVEAIEDAGFEAEILPDSTVSQPKPHKTLSGQFRIGGMTCAACVNSVEGILKKLPGVKGAVVALATSLGEVEYDPSAISKDEIVQAIEDAGFDAALLQSSDQDKVLLNVQGLHFEEDVDVLHDILKKMEGLRQFGVNFANSEVDIVFDPEVVGLRQIVDTIETESNNRLKAHVQDPYIRAASNDAQEASKTLHLLRFSLFLSIPVFFIRMVCPRIPLISSFLLMHFGPFRIGDLLRWILVTMVQFIVGKRFYVAAYRALRHGSTNMDVLVVIGTTASYVYSVCALLYGAFTGFHPPIYFETSAMIITFVLFGKYLEVLAKGKTSDAIKKLVELAPATAILLLKDKEGKYSGEKEIDASLVQPGDVLKVLPGSKVPADGIVIWGTSHVNESMVTGESVPISKEVSSLVIGGTMNLHGVLHIQATKVGSGTVLSQIISLVETAQMSKAPIQKFADYVASIFVPIVITLSFLTFLAWFLCGWLGAYPNSWSAESSNCFVFSLMFSISVVVIACPCALGLATPTAVMVATGVGASHGVLVKGGDALERAQNVKYVIFDKTGTLTQGKATVTATKIFSGMDLGDFLTLVASAEASSEHPLAKAILDYAFHFHFFGNLPSGKDSIKRRKEEILSQWLLEVVDFAALPGKGIQCWINGKKVLVGNRALITENGVNIPEEAERFLVDMELNAKTGILVAYDGDFIGLVGITDPLKREAAVVIQGLKKMGVHPVMVTGDNWRTARAVAKEVGIDDVRAEVMPAGKADVIHSLQKDGSVVAMVGDGINDSPALAAADVGMAIGAGTDIAIEAADYVLVRNNLEDVITAIDLSRKTFIRIRWNYFFAMAYNVIAIPVAAGALFPFTGVQMPPWLAGACMAFSSVSVVSSSLLLRRYRKPRLTTVLQITVE

SEQ ID NO: 3558 - protein, 1012 aa, Oryza sativa Japonica Group
MAHLQLTPLAAGGGRGGADEMEEVALLGPESYDEEAAAAPGPEEEEGMRRVQVRVTGMTCSACTAAVEAAVSARRGVGGVAVSLLQSRARVVFDPALAKEEDIIEAIEDAGFEAELLPDSTVSQPKLQNTLSGQFRIGGMTCAACVNSVEGILKKLPGVKRAVVALATSLGEVEYDPSVISKDEIVQAIEDAGFEAALLQSSEQDKVLLGLMGLHTEVDVDILHDILKKMEGLRQFNVNLVLSEAEIVFDPEVVGLRSIVDTIEMESSGRLKAHVQNPYIRAASNDAQEASKMLHLLCSSLFLSHTDSPLVPLQQIPVFFIRMVCPRIHFTRSLLLMHLGPFYIGDLLKWILVSIVQFGVGKRFYVAAYRALRHGSTNMDVLVVLGTTASYVYSVCALLYGAFTGFHPPKYFETSAMIITFVLFGKYLEVLAKGRTSDAIKKLVELVPATALLLLKDKEGKYAAEKEIDASLIQPGDVLKVLPGSKVPADGTVVWGTSHVDESMVTGESAPISKEVSSIVIGGTMNLHGILHIQATKVGSGTVLSQIISLVETAQMSKAPIQKFADYVAGIFVPIVVTLSLVTFIAWFLCGSLGAYPNSWVDETSNCFVFSLMFSISVVVIACPCALGLATPTAVMVATGVGANHGVLVKGGDALERAQNVKYVIFDKTGTLTQGKATVTSTKVFSGIDLGDFLTLVASAEASSEHPLAKAILDYAFHFHFFGKLPSSKDDIKKRKQQILSQWLLEVAEFSALPGKGVQCLINGKKILVGNRTLITENGINIPEEAESFLVDLELNAKTGVLVAYDSELIGSIGMTDPLKREAVVVVEGLKKMGIYPVMVTGDNWRTAQAVAKEVGIEDVRAEVMPAGKADVVRSLQKDGSVVAMVGDGINDSPALAAADVGMAIGAGTDIAIEAADYVLVRNNLEDVITAIDLSRKTFSRIRWNYFFAMAYNIIAIPVAAGALFPFTGLQMPPWLAGACMAFSSVSVVCSSLWLRRYRKPRLTTLLQITVE

SEQ ID NO: 3559 - protein, 1030 aa, Oryza sativa Japonica Group
MAHLQLTPLAAGGGRGGADEMEEVALLGPESYDEEAAAAPGPEEEEGMRRVQVRVTGMTCSACTAAVEAAVSARRGVGGVAVSLLQSRARVVFDPALAKCCNLETCNCKQSPYNEEDIIEAIEDAGFEAELLPDSTVSQPKLQNTLSGQFRIGGMTCAACVNSVEGILKKLPGVKRAVVALATSLGEVEYDPSVISKDEIVQAIEDAGFEAALLQSSEQDKVLLGLMGLHTEVDVDILHDILKKMEGLRQFNVNLVLSEAEIVFDPEVVGLRSIVDTIEMESSGRLKAHVQNPYIRAASNDAQEASKMLHLLCSSLFLSIPVFFIRMVCPRIHFTRSLLLMHLGPFYIGDLLKWILVSIVQFGVGKRFYVAAYRALRHGSTNMDVLVVLGTTASYVYSVCALLYGAFTGFHPPKYFETSAMIITFVLFGKYLEVLAKGRTSDAIKKLVELVPATALLLLKDKEGKYAAEKEIDASLIQPGDVLKVLPGSKVPADGTVVWGTSHVDESMVTGESAPISKEVSSIVIGGTMNLHGILHIQATKVGSGTVLSQIISLVETAQMSKAPIQKFADYVAGIFVPIVVTLSLVTFIAWFLCGSLGAYPNSWVDETSNCFVFSLMFSISVVVIACPCALGLATPTAVMVATGVGANHGVLVKGGDALERAQNVKYVIFDKTGTLTQGKATVTSTKVFSGIDLGDFLTLVASAEASSEHPLAKAILDYAFHFHFFGKLPSSKDDIKKRKQQILSQWLLEVAEFSALPGKGVQCLINGKKILVGNRTLITENGINIPEEAESFLVDLELNAKTGVLVAYDSELIGSIGMTDPLKREAVVVVEGLKKMGIYPVMVTGDNWRTAQAVAKEVGIEDVRAEVMPAGKADVVRSLQKDGSVVAMVGDGINDSPALAAADVGMAIGAGTDIAIEAADYVLVRNNLEDVITAIDLSRKTFSRIRWNYFFAMAYNIIAIPVAAGALFPFTGLQMPPWLAGACMAFSSVSVVCSSLWLRRYRKPRLTTLLQITVEILLTDRTYTRTSAA

SEQ ID NO: 3560 - protein, 1001 aa, Oryza sativa Indica Group
MAHLQLTPLAAGGGRGGADEMEEVALLGPDSYDEEAAAAAGPEEEEGMRRVQVRVTGMTCSACTAAVEAAVSARRGVGGVAVSLLQSRARVVFDPALAKEEDIIEAIEDAGFEAELLPDSTVSQPKLQNTLSGQFRIGGMTCAACVNSVEGILKKLPGVKRAVVALATSLGEVEYDPSVISKDEIVQAIEDAGFEAALLQSSEQDKVLLGLMGLHTEVDVDILHDILKKMEGLRQFNVNLVLSEAEIVFDPEVVGLRSIVDTIEMESSGRLKAHVQNPYIRAASNDAQEASKMLHLLCSSLFLSIPVFFIRMVCPRIHFTRSLLLMHLGPFYIGDLLKWILVSIVQFGVGKRFYVAAYRALRHGSTNMDVLVVLGTTASYVYSVCALLYGAFTRFHPPIYFETSAMIITFVLFGKYLEVLAKGRTSDAIKKLVELVPATALLLLKDKEGKYAAEKEIDASLIQPGDVLKVLPGSKVPADGTVVLGTSHVDESMVTGESAPISKEVSSIVIGGTMNLHGILHIQATKVGSGTVLSQIISLVETAQMSKAPIQKFADYVAGIFVPIVVTLSLVTFIAWFLCGSLGAYPNSWVDETSNCFVFSLMFSISVVVIACPCALGLATPTAVMVATGVGANHGVLVKGGDALERAQNVKYVIFDKTGTLTQGKATVTSTKVFSGIDLGDFLTLVASAEASSEHPLAKAILDYAFHFHFFGKLPSSKDDIKKRKQQILSQWLLEVAEFSALPGKGVQCLINGKKILVGNRTLITENGINIPEEAESFLVDLELNAKTGVLVAYDSELIGSIGMTDPLKREAVVVVEGLKKMGIYPVMVTGDNWRTAQAVAKEVGIEDVRAEVMPAGKADVVRSLQKDGSVVAMVGDGINDSPALAAADVGMAIGAGTDIAIEAADYVLVRNNLEDVITAIDLSRKTFSRIRWNYFFAMAYNIIAIPVAAGALFPFTGLQMPPWLAGACMAFSSVSVVCSSLWLRRYRKPRLTTLLQITVE

SEQ ID NO: 3561 - protein, 1002 aa, Hordeum vulgare subsp. vulgare
MAHLQLAAVAGGGRAGDDMEDVALLGSYDEETGGAAPAGGGGGAEDEEEAEAHVRVTGMTCSACTSAVEAAVSARRGVRRVAVSLLQNRARVVFDPALAKVEDIIEAIEDAGFDAEILPDSAVPQSKSQKTLSAQFRIGGMTCANCVNSVEGILKKQPGIKGAVVALATSLGEVEYDPSTISKDEIVQAIEDAGFDAAFLQSSEQDKVLLGLTGVHAERDADILHDILKKMDGLRQFGVNTALSEVEIVFDPEAVGLRSIVDAIEMGSNGRFKAHVQNPYSRGASNDAHEASKMLHLLRSSLFLSIPVFFIRMICPSIPFISTLLLMHCGPFHMGDLVNWILVSIVQFVIGKRFYVAAYRALRHGSTNMDVLVVLGTTASYVYSVCALLYGAFTGFQPPIYFETSAMIITFVLFGKYLEVLAKGKTSDAIKKLVELVPATAVLLLKDEEGKYVGEREIDALLVQPGDVLKVLPGSKVPSDGFVVWGTSHINESMITGESAPMPKEVSSVVIGGTINLHGILHIQATKVGSGTVLSQIISLVETAQMSKAPIQKFADYVASIFVPIVITLSILTFSVWFLCGSFGAYPHSWFDRTSNCFVFSLMFSISVVVIACPCALGLATPTAVMVATGIGANHGVLVKGGDALERAQNVNYVIFDKTGTLTQGKAVVTTAKVFSGMDLGDFLTLVASAEASSEHPLAKAVLEYAFHFHFFGKLPSSKDGLEQRKEQILSQWLLEAEDFSAVPGKGVQCLINEKKVLIGNRALMNENGVSVPPEAESFLVDLELNAKTGILVAYDSSFMGLMGIADPLKREAAVVVEGLKKMGIHPVMLTGDNWRTAQAVAKEVGIEDVRAEVMPAGKADVVRSLQKDGSIVAMVGDGINDSPALAAADVGMAIGGGTDIAIEAADYVLVRNNLEDVITAIDLSRKTFNRIRWNYFFAMAYNVVAIPVAAGALFPMTGLQMPPWLAGACMAFSSVSVVCSSLLLRRYRKPRLTTVLQITIE

SEQ ID NO: 3562 - protein, 996 aa, Sorghum bicolor
MEDVALLDSYDEEMGLPPLGASGAEEGAAAEAHVRVTGMTCSACTSAVEAAVSARSGVRRVAVSLLQNRAHVVFDPALSKVLLSSPRCGVLCFQVEDIIEAIEDAGFEAEIIPESAVSQPKSQKTLSAQFRIGGMTCANCVNSVEGILKKLPGVKGAVVALATSLGEVEYVPSAISKDEIVQAIEDAGFEAAFLQSSEQDKVLLGLTGLHTERDVEVLNDILKKLDGLRQFGVNIVLSEVEIVFDPEAVGLRSIVDTIEMASNGRFKADVQNPYTRGASNDAQEASKMLNLLRSSLFLSIPVFFIRMVCPSIPFLSTLLSMHCGPFLMGDLLKWILVSIVQFVVGKRFYVAAYRAVRHGSTNMDVLVVLGTTASYAYSVCALLYGAFTGFHPPVYFETSAMIITFVLLGKYLEVLAKGKTSDAIKKLVELVPSTAILVLKDKEGKHVGEREIDARLVQPGDVLKVLPGSKVPADGVVVWGTSHVNESMITGESAPIPKEVSSVVIGGTINLHGILHIQATKVGSGTVLSQIISLVETAQMSKAPIQKFADYVASIFVPIVITLSIVTFSAWFLCGWLGAYPNSWVAENSNCFVFSLMFAISVVVIACPCALGLATPTAVMVATGIGANHGVLVKGGDALERAQNVKYVVFDKTGTLTQGKAVVTAAKVFSGMDLGDFLTLVASAEASSEHPLAKAVLDYAFHFHFFGKLPSSKDGIEQQKDKVLSQWLLEAEDFSAVPGKGVQCSINGKHVLVGNRSLMTENGVTIPPEAETFLIDLESNAKTGILVAYDGDFVGLMGITDPLKREAAVVVEGLKKLGVHPVMLTGDNWRTAQAVAKEVGIEDVRAEVMPAGKADVVRALQKDGSTVAMVGDGINDSPALAAADVGMAIGGGTDIAIEAADYVLVRNNLEDVITAIDLSRKTFSRIRWNYFFAMAYNVVAIPIAAGALFPFTGLQMPPWLAGACMAFSSVSVVCSSLLLRRYRKPRLTTVLQITVE

SEQ ID NO: 3563 - protein, 359 aa, Zea mays
MNHLTPALHGAMRPPSAQGQGLARYGSAPGSLLAAIADSVTRGDPAPPPPPPVSRFYSAESSGLTSCESSCRTDCGRPPLERAYGGSGEIRVPPPLQQQQHHLLAPPAASPLFRHSSSPAGLLSRLMTDPHGMAATGGAMGSYTQAGSDAALGHGHAQLSSQWSFSRQDLPQISEMGMIPADIGESIVGAGGCNSSSDAAQSSSYLSRTFSVGSWDDTNSIMFSSAPCKKPKVDPAAGADDMVTNFSTIDPQFGLSNSSLELPGMDDYLQLQQDSVACRVRARRGCATHPRSIAERERRTRISKRLKKLQDLVPNMDKQTNTSDMLDLAVDYIKELKDQVEKLKHDQANCCCLGNKSCC

SEQ ID NO: 3564 - protein, 361 aa, Sorghum bicolor
MNLNRLTPAHHGAMRPPSVQGQGLARYGSAPGSLLAAIAESVTRGDPAPPPPPVSRFYSAESSGLTSCESSCRTDGGGGGRPPPLERAYGGSGEIRVPPPPQQQHPLAASTLFRHSSSPAGLLSRLMADPHGMAATGGGMGSYPQVGSDAAMGHGHRQLSSQWSFSRQDLPQISEMGMIPDIGESIVAGGCNSSSEGGGGGATQAQSSSYLSRNFSVSSWDDTNSIMFSSPSKKPKVDPADDMVTSFSNIDSQFGLSNSSLEMSGMDDYLQMQQDSVACRVRAKRGCATHPRSIAERERRTRISKRLKKLQDLVPNMDKQTNTSDMLDLAVDYIKELKDRVEKLKHDQANCCCLGVANKGC

SEQ ID NO: 3565 - protein, 276 aa, Zea mays
MAYYSGGGKLSAVDAILAEAADLVALEQVAKLNTAHLDDDSALPSSLEARFRKLKSLPSPAAVPPVSTLARSATAPRPAPALPGPDPPAPAPPVHHPVHEDPPPGDAETKGGGSSPRQARAPAPAPTVHADDAEDLDQLFGSAPRGRPTLRERNRGSDSSSVSPSPPPPPRQACCFGFSPKKPLQRAPSAKGKKKEVRHGSRDVLGVDADEWGDENRRIATELREQQRRLRKALEDQVQVSRETAKMARWVKQASARMTHAEAIDDLLSDCEDDLK

SEQ ID NO: 3566 - protein, 293 aa, Sorghum bicolor
MAHYYSGGAGGKLSAVDAILAEAADLVALEQIAKLNTAHLADDSALPSTLEARFRKLKSLPSAAAPPPPVRTLTRSVTAPGPAAALPDPNPPAPAPPEHHLAPAVHEDPPPPPPLPGDAETKCGGSSPREARDPAPAPAVHDADAEDGADDLERLFGSGPRGRPTLRERNRGRDSSSSASPSPPPQRQACCFGFSPKKPLERTPSSKATKKVHHGSGDVLGVDADEWGDENRRMATELREQQRRLRKALEDQVQVSRETAKMARWVKQASARMTHVEAIDDLLSDCEDDEELK

SEQ ID NO: 3567 - protein, 312 aa, Zea mays
MAANVGAGRSAGGGGAGTGTGTAAGSGGVSTAVCRPSGSRWTPTPEQIRILKELYYGCGIRSPNSEQIQRITAMLRQHGKIEGKNVFYWFQNHKARERQKRRLTNLDVNVPVAADDSAAHLGVLSLSPSSGCSGAAPPSPTLGFYAGGNGSAVMLDTSSDWGSAAAMATEACFMQDYMGVMGGRVTVGMLLLLVGGPDGGAGAAPKVTRAPETLPLFPTGGGGGGGDDSQPPRPRQPVPAGSYLPFWGAAPTPTGSATSVAIQQQHQRLQMQEQYSFYSNAQLPGTGSQDAAATSLELSLSSWCSPYPAGTM

SEQ ID NO: 3568 - protein, 327 aa, Sorghum bicolor
MAANVGAGRSAVGGGGGGGAGGTGTAAASGSVATTAVCRPIGSRWTPTPEQIRILKEFYYGCGIRSPNSEQIQRITAMLRQHGKIEGKNVFYWFQNHKARERQKRRLTNLDVNVPTAAAAGAADASTHLGVLSLSSPSGAAPPSPTLGFYAGNGGAGSTVLLDTSSDCAAMATETCFLQDYMGVMGTGSAAAASPWACFSSSNTMAAAAARAPTVTRAPETLPLFPTGGDDSQPRRPRHGVPVPVAAGEAIRGGSSSSRYLPFWGAAPTTASATSIGIQQQHQLLQLQEQYSFYSNAMPGTGSQDASAASLELSLSSWCSPYPAGTM

SEQ ID NO: 3569 - protein, 512 aa, Zea mays
MDSPLLSTPALLALSLLLLALYIARRRRGGGKNRNYPPVAGTVFHQLLHFRRLMEYQTELAHRYRTFRMLTPTCNYVYTVEPANVEYILKTNFGNYGKGAMIHDVMEDLLGDGIFNVDGARWRHQRKVASHEFSTRVLRDYSSGVFRDTAAELAGIVAVAARGAGPGERPLDVADLLMRSTLDSMFKVGFGVDLGSLSGCGDDEGAAAFARAFDDASEQVLYRFFDPSWKVKRLLGVSSEGAMKGSIRTIDQFVYGVIDRKIKQMGRDQEFAKKEDILSRFLMERESDPGCFDNKYLRDIILNFVIAGRDTTAGTLSWFLYVLCRNQHVQDRVAREVRAAATGDRDDVGVQEFVTCLTEDAISRMRYLHAVLTETLRLYPAVPIDVKYCFSDDTLPDGYAVKKGDMVNYQPYQMGRMKFLWGADAEEFRPERWINDDGVFVNESPFKFTAFQAGPRVCLGKEFAYRQMKIFAAVLVYAFRFEMWEANATMGYRPMLTLKMDGPLYVRASLRQ

SEQ ID NO: 3570 - protein, 506 aa, Oryza sativa Indica Group
MESPLSHPAMVALSLLLLVALYLARRAVLGKKRRYPPVAGTMFHQLLNFGRLLEYHTELSRKYRTFRMLTPTCNYVYTVEPANVEHILKTNFANYGKGPMTHDVLEDLLGDGIFNVDGGMWRQQRKVASLEFSTRVLRDYSSAVFRDTAAELAGILERGPAAKGRERVDMQDLLMRATLDSFFRVGFGVNLGVLSGSSKEGLVFARAFDDASEQVLFRFFDLLWKVKRFLNISSEATMKQSIRTINDFVYSIIDRKIEQMSREQHEFAKKEDILSRFLLEREKDPGCFDNKYIRDIILNFVIAGRDTTAGTLSWFLYAVCKNQRVQDKIAREVRDATTGDRDVGVQDFSSFLTEDAINKMQYLHAALTETLRLYPGVPLDVKYCFSDDTLPDGHAVKKGDMVNYQPYPMGRMKFLWGDDAEEFKPERWLDDSGMFVAESPFKFTAFQAGPRICLGKEFAYRQMKIVSAVLLYFFRFEMWDVDATVGYRPMLTLKMDGPFYLRALAR

SEQ ID NO: 3571 - protein, 508 aa, Sorghum bicolor
MDSPPGQPTVVTLILALLLVLYLALRRRAGAGGAKNRSYPPVAGTVLHQLFNFGRLMEYHTELSRRYRTFRMLTPSSSYIYTVEPANVEYILKTNFSNYGKGSKVHEVGEDLLGDGIFSVDGAKWRHQRKVASHEFSTRVLRDYSTGVFRDTAAELAGIVAADAGEKVDMQDLLLRSTLDSIFTVGFGVRLGVLSGSSKEGAAFAKAFDDASEQVLHRFLDPFWKAKRFLNFSLETAMKRSVRTINDFVYAVVDKKIEQMGRDQQEFAKKEDILSRFLVERESDPGCFDNKYLRDIILNFVIAGRDTTAGTLSWFLYVLCRNQHIQDKVAEEVRAAATSGDGDLGAPELVACLTDDAIGKMHYLHAALTETLRLYPAVPIDVKCCFSDDTLPDGYAVNKGDMVHYQPYQMGRMQFLWGADAEEFRPERWLDDGGVFVPESPFKFTAFQAGPRVCLGKEFAYRQMKIFAAVLLYLFRFEMWDANATVGYRAMLTLKMDGPLYVRASLRR

SEQ ID NO: 3572 - protein, 506 aa, Oryza sativa Japonica Group
MESPLSHPAMVALSLLLLVALYLARRAVLGKKRRYPPVAGTMFHQLLNFGRLLEYHTELSRKYRTFRMLTPTCNYVYTVEPANVEHILKTNFANYGKGPMTHDVLEDLLGDGIFNVDGGMWRQQRKVASLEFSTRVLRDYSSAVFRDTAAELAGILERGPAAKGRERVDMQDLLMRATLDSFFRVGFGVNLGVLSGSSKEGLVFARAFDDASEQVLFRFFDLLWKVKRFLNISSEATMKQSIRTINDFVYSIIDRKIEQMSREQHEFAKKEDILSRFLLEREKDPGCFDNKYIRDIILNFVIAGRDTTAGTLSWFLYAVCKNQRVQDKIAREVRDATTGDRDVGVQDFSSFLTEDAINKMQYLHAALTETLRLYPGVPLDVKYCFSDDTLPDGHAVKKGDMVNYQPYPMGRMKFLWGDNAEEFKPERWLDDSGMFVAESPFKFTAFQAGPRICLGKEFAYRQMKIVSAVLLYFFRFEMWDDDATVGYRPMLTLKMDGPFYLRALAR

SEQ ID NO: 3573 - protein, 454 aa, Zea mays
MEYQTALSRRYRTFRMLTPTCSYIYTVEPANVEYILKTNFGNYGKGSTLHELSEDLLGDGIFNVDGAKWRHQRKVASHEFSTRVLRDYSTGVFRDTAAELAGIVAAAAAAGEKLDMQELLMRSTLDSIFKVGFGVNLGVLSGSSEEGAAFAKAFDDASEQVLHRFLDPFWKAKRFLNLSSEAAMKRSLRTINDFVYAVVDRKIEQMGRDQQEFAKKEDILSRFLVERESDPGCFDNKYLRDIILNFVIAGRDTTAGTLSWFLYVLCKNQSIQDRIAQEVRAATSGDGGGLGAPELVACLTEDAISKMHYLHAALTETLRLYPSVPIDVKCCFSDDTLPDGYAVKKGDMVNYQPYQMGRMRFLWGADAEEFRPERWLDDAGVFVPESPFKFTAFQAGPRVCLGKEFAYRQMKIFAAVLLYLFRFEMWDANATVGYRAMLTLKIDRPLYLRTSLRR

SEQ ID NO: 3574 - protein, 407 aa, Zea mays
MAAAGPRRAGARFLLARGIGSSVAHVHSLGRGGGGVTMPRALLADSAPASAPAMTGRAPPAASSSASAAASRITPAVLFVTVVLAVVLLVSGLLHVLRRLFLKSHHAGAGAGERHLQHLFFPAHDDGAGAGSGSGSGAGGGGGLGQDAIDALPEFAYGELSGGGAAAAAPASRKGKEKAAGPFDCAVCLSEFADHDRLRLLPLCGHAFHVACIDVWLRSSATCPLCRTKLSARHLVAAAADAPAPASVAPDVGEQRPQRDQAPEAAEAASSSVVLPVRLGRFKNADAESAEAESSNGGATSRVERRRCYSMGSYQYVLADEHLLVSVHLRHGTSAAVAASSGVDGDDRQQHQGKKVFARGDSFSVSKIWQWRGSKRLPGALCADDGLPWAPAKDDRASACTKQRGDT

SEQ ID NO: 3575 - protein, 408 aa, Sorghum bicolor
MAAGLRRAGGRFLLAREIRSSGAGANVHFFGARGGVTMPRALLEDPAPAPAMDATATTTGRGSPPSASVSAAASRITPAVLFVTVVLAVVLLVSGLLHVLRRVFLKSHHASAGAGERQLQHLFFPAHDDGGASGSGTGGGGLGQAAIDALPEFAYAELSGTAAAAASRKGKEKAARPFDCAVCLCEFADHDRLRLLPLCGHAFHVACIDVWLRSSATCPLCRTKVSARHLAAATDAPSSVATDVEEQKPQQDQAPPDAVEAASSSVVLPVRLGRFKNVDDDAESSSSTGATSRIDRRRCYSMGSYQYVLADEHLLVSVHLRHGNAGGGAGTACGTSSSAAVTAASSSDEQHQGKKVFARGDSFSVSKIWQWRGSKRLPGGLCADDGLPWAPAAKDDHASANTRQHSDT

SEQ ID NO: 3576 - protein, 416 aa, Sorghum bicolor
MSASGDPLDALPAAVLADVLGRVADAGDIAACRLASRALLAASYLCPRVRLCAADCARRRCEGGGGFPAFCATTANLASLLGPHLRSLHLTSGEAVAAWAATSTAAVLRELEIADYWPQACWRKAEALPLISHYCQNLVKLGLKNAWLSVEGLKKMPNLTHLTLEFIRLDDEDLNQLNECFPCLHTLNLIGVGGLKDPKIDLLHLKACRWEVSNVPRSLVVRAPDLVFLELKCIRPDTLILDTPSLSTLKLTIDKLGANVRVDGLLRLTNLHIESLDFSSLFLVFIDNRGIRTLELELPEFASQYELLEAVNPDYLLKMLASISEVKLAPRFSCELKLCLALCKGSQFGSCLKKLLIHVPQPGSCSHLLPLFEICAPLCEVTVLFHTESADAVRQGAISICMQNFPDIRWQWGTWQ

SEQ ID NO: 3577 - protein, 428 aa, Zea mays; identical to SEQ ID NO: 1056

SEQ ID NO: 3578 - protein, 438 aa, Zea mays
MAPKRPAAASGSASEASDAEADAGHHQPSSPSPSKTPPPPNPNPKSTAAGPTSAAEDSTAAGSGSEAAYDSDADHRTAPRNAASPSSKPRSTRPRSRSRSRSPDAASYSDGVASDADADPAAVDGADSADDGNASPLAPPRPSRAEAAAVKPISSRPMDPPRRSMVPSFSEQRSKRPRSVAVPSSVEHLKRPTRLWSLHDEIVILRGLATYRAKRGVLPGSTYDISKLHGRIRSELSVKVTTTQLGDKVRRLKQKYNLLASRGKSGRDPDLPSQHEQSVYEIGKKVWGGSANGGGSTGGDGYEIGGDSEEEHEFRESDEDVENGRDERARKNRRVMPIAMANGNGAGLGAVKANSRGKFDTEKGKDAYPYLWETVEDLSKEHPNGVAFKKAFESIEGPKARGMEEKLRKFRLTEIRHQLRRMELMKETVKMVLDALEG

SEQ ID NO: 3579 - protein, 442 aa, Sorghum bicolor
MAPKRPAAVAASGSASEASDAEADAAHHQPSSPSPSKTPPPNPNPKSAAAGPTSAAEDSTAAGSDSEAAYDSDADHRPAPRKAAAAAASSPSRKPRSPRPRSRSRSPDAASYSDVAASDADPTAGDSADDDNASPLALRPPRPSRAEAAAIKPLSSRPMDPPRRSMVPSFSEPRPKRPRSAAVPSSVEQLKRPSRLWSLRDEIVILRGLATYRAKRGVLPGSMYDISKLHGHIQSELSVKVTPTQLSDKVRRLKQKYNLLSSRGKNGRDPDLPTQHEQSVYEIGKKVWGTTANGGGSTGGDGYEIGGGGDDSEEDHEIAESDDDVESGRDERPRKNRRVMPIAMANGNGAGFGAMNANSRGKFDIEKGKDAYPYLWETVEDLSKEHPNGVAFKKAFELIEGPKARGMEEKLRKFRLTEIRHQLRRMELMKETVKMVLDALEG

SEQ ID NO: 3580 - protein, 470 aa, Zea mays
  misc_feature (414)..(414): Xaa can be any naturally occurring amino acid
MDAATGNCSSSPLRIVICPWLAFGHMLPCLELAERLASRGHRVSFVSTPRNLARLPPRRHDVHLVPLPLPRVEGLPDGVESTNDVPPDKRDLHWKAFDGLAVPFAEFLAAACADEATRPDWVLADTFSHWAAAVALEHKVPSAMLLPSAAMIASCWHRPPSHAEQPRSAVFEEPAERPAGVLPYEWDKRAHFFGPQRASGMSTAQRCFLTLQRCRLLAMRSCPEWEPENFTVAAALLGKPLVPLGLLPPSPNGGRRREEDGGSTARCWLDAQPPSSVVYVALGSEVPLTVALVHELALGLELAGARFLWALRKPSGVADDADVLPPGFRERTCGRGLVAMGWVPQMSILAHGAVGGFLTHCGRNSLVEGLLFGHPLVMLPVVGDQGPNARAMERTKVGLQVARNGKDGSFDRHXVAAAVREVMLVEEARKVFVANALEMQRVVADKERHERYIDEFIRQLRSYSTPPAAS

SEQ ID NO: 3581 - protein, 892 aa, Oryza sativa Japonica Group; identical to SEQ ID NO: 3474

SEQ ID NO: 3582 - protein, 305 aa, Zea mays
MKPAEDEDAPATAAAQTVWYDPMTSPQAPAPQQQPAIEAAMRGASPSVSSNARPLRVYADGIYDLFHFGHARALEQAKKSFPNTYLLVGCCSDEITHMYKGKTVMTEDERYESLRHCKWVDEVIPDAPWVINQEFIDKHDIDYVAHDALPYADTSGAANDVYEFVKAIGKFKETKRTEGISTSDIIMRILKDYNQYIMRNLTRGYSRKDLGVSYVKEKQLRVNMGISKLREKVKEHQEKFHSAAKIAGTNPVEWMENADRWIVGFLEKFEEGCHMMETAIKGRIQEGLKRQGRSESNLSGEESDS

SEQ ID NO: 3583 - protein, 307 aa, Zea mays
  misc_feature (305)..(306): Xaa can be any naturally occurring amino acid
MKPAEDADAPAPETAAAQTVWYDPMTSPQAPAPQQQPAIEAAMRGASPSVSSNARPLRVYADGIYDLFHFGHARALEQAKKSFPNTYLLVGCCSDEITHMYKGKTVMTEDERYESLRHCKWVDEVIPDAPWVINQEFIDKHDIDYVAHDALPYADTSGAANDVYEFVKAIGKFKETKRTEGISTSDIIMRILKDYNQYIMRNLTRGYSRKDLGVSYVKEKQLRVNMGISKLREKVKEHQEKFHSAAKIAGTNPVEWMENADRWIVGFLEKFEEGCHMMETAIKGRIQEGLKRQGRSESNLSGEEXXS

SEQ ID NO: 3584 - protein, 312 aa, Sorghum bicolor
MKPAEDADVQEAMVTATAAAAAAQTVWYDPMSSPQAPAPHQQPAIETAEAASPSMSSDARPLRVYADGIYDLFHFGHARALEQAKKSFPNTYLLVGCCSDEITHMYKGKTVMTEDERYESLRHCKWVDEVIPDAPWVINQEFIDKHNIDYVAHDALPYADTSGAANDVYEFVKAIGKFKETKRTEGISTSDIIMRILKDYNQYIMRNLTRGYSRKDLGVSYVKEKQLRVNMGISKLREKVKEHQEKFHSAAKIAGTNPVEWMENADRWIVGFLEKFEEGCHMMETAIKDRIQEGLKRQGRSESNLSGEDSDS

SEQ ID NO: 3585 - protein, 281 aa, Oryza sativa Japonica Group
MKPLKDADAQEKAAPPPTEWYDPLSSPGRPVRVYADGIYDLFHFGHARALEQAKKSFPNTYLLVGCCSDEITNLYKGKTVMTEDERYESLRHCKWVDEVIPDAPWVINQEFLDKHRIDYVAHDALPYADTSGAANDVYEFVKAVGKFKETKRTEGVSTSDIIMRILKDYNQYIMRNLTRGYSRKDLGVSYVKEKQLRVNMGISKLREKVKEHQEKFHSAAKIAGSNPVEWMENADRWIVGFLEKFEEGCHMMETAIKDRIQEGLKRQSRSDPNLSGEDSDS

SEQ ID NO: 3586 - protein, 281 aa, Oryza sativa Japonica Group
MKPLKDADPQEKAAPPPTEWYDPLSSPGRPVRVYADGIYDLFHFGHARALEQAKKSFPNTYLLVGCCSDEITNLYKGKTVMTEDERYESLRHCKWVDEVIPDAPWVINQEFLDKHRIDYVAHDALPYADTSGAANDVYEFVKAVGKFKETKRTEGVSTSDIIMRILKDYNQYIMRNLTRGYSRKDLGVSYVKEKQLRVNMGISKLREKVKEHQEKFHSAAKIAGSNPVEWMENADRWIVGFLEKFEEGCHMMETAIKDRIQEGLKRQSRSDPNLSGEDSDS

SEQ ID NO: 3587 - protein, 353 aa, Zea mays
MQMEGREGIAVGRESGHGSMFRAADIAMAEAQEAAAKGYQSSPSSPSTSPTPSPPAAAAGHAGDAAATPLAWSLGGETPSGAVVVDNGTQTAGQSEHASLSSGRRRGRPRGSGRRQILATLGEWYALSAGGSFTPHVIIVGTGEDVAARIMSFSQKGPRSVCILSANGSISNVTLRQPDASGSTFTYEGRFEILQLMGSFTMAEEGRRRTGGLSVSLAGPDGRVVGGVVAGMLRAASPIQVIVGSFLPNSLKQHQRRRMSMQQPSPVPALPAPVAPPPPVLTAATPISQAGPGNGFHAPPPPHSAAPPQPHANAMNLNATTTGFTMVGWPASSPQPMAYRASPDINVSLTPQE

SEQ ID NO: 3588 - protein, 351 aa, Zea mays
MEGREGIAVGRESGHGSMFRAADIAMAEAQEAAAKGYQSSPSSPSTSPTPSPPAAAAGHAGDAAATPLAWSLGGETPSGAVVVDNGTQTAGQSEHASLSSGRRRGRPRGSGRRQILATLGEWYALSAGGSFTPHVIIVGTGEDVAARIMSFSQKGPRSVCILSANGSISNVTLRQPDASGSTFTYEGRFEILQLMGSFTMAEEGRRRTGGLSVSLAGPDGRVVGGVVAGMLRAASPIQVIVGSFLPNSLKQHQRRRMSMQQPSPVPALPAPVAPPPPVLTAATPISQAGPGNGFHAPPPPHSAAPPQPHANAMNLNATTTGFTMVGWPASSPQPMAYRASPDINVSLTPQE

SEQ ID NO: 3589 - protein, 362 aa, Sorghum bicolor
MQMEGGREGIAVAPGGGGHESGGHGMFRAAAAAADIAMAEAQEEAAVKGYQSSPSTSPTPSPPPPAAAAAGHAGDAAATPLAWSLGGEEKPSGAAGDNNGMQTAGQSGEHASLSSGRRRGRPRGSGRRQILATLGEWYAMSAGGSFTPHVIIVGTGEDVAARIMSFSQKGPRSVCILSANGTISNVTLRQPDASGSTFTYEGRFEILQLMGSFTMAEEGRRRTGGLSVSLAGPDGRVVGGVVAGMLRAASPIQVIVGSFLPNSLKQHQRRMSMQQQPSPVSPALPALVAPPPVLTTATPISQAGPGNGFHAPPPSATPPQPHASAMNLNSTGFTMVGWPASSPQPLAYRASPDINVSLTPQE

SEQ ID NO: 3590 - protein, 366 aa, Oryza sativa Japonica Group
MHMEGGEGIAVAGAGGGHEAGFGLFRAADVTMTEAQEAAKEYQSSPSSPSTSPTPSPPPVAASGHGGEAAATPTMWSLGGEKMPSEAAGDNGMQMSGHSEHASLSSGRRRGRPKGSGRRQILATLGEWYALSAGGSFTPHVIIVGTGEDVAGRIMSFSQKGPRSICILSANGTISNVALSQPGSSGSTFTYEGRFEILQLTGSFTMAEEGGRRRTGGLSVSLAGPDGRVVGGVVAGMLRAASPIQVIVGSFLPNSLKQHQRRMGLQQQPSAAPALPPPMAPPPVLTAAMPISQAAPGTNGCHAPQVSSMHPQAHTGVMEHSATASGAMNLNSSSSTGFTMVGWPVSSQSMGHRPSPDINVCLTPQE

SEQ ID NO: 3591 - protein, 356 aa, Sorghum bicolor
MGGREGIAVAGGHESGHGLFRADISMTEAQEAAAKGYQFSLSSPSTSPTPSPPPPAAAGDGGDATPVPLAWSLGGDKPSEASGNNGVQTAAQTEHANLSSGRRRGRPRGSGRRQILATLGEWYALTAGGSFTPHVIIVGTGEDVAARIMSFSKKGPRSVCILSANGTISNVTLRQPDPSGSTFTYEGLFEILQLTGSFTMAEEGRKRTGGLSVSLAGPDGRVVGGVVAGMLRAASPIQVIVGSFLPNSLKQHQRRMTLQQQQQQPPAFPAPPAPPAPVAPPPVLTAAMPISQAGFGNGFHAPPPSVVPPQPHASTEHGAMNLNSTTGFTMVGWPASSPPMPHRASPDINVSLTPQE

SEQ ID NO: 3592 - protein, 335 aa, Zea mays
MAPLGDGGAAAAAASNNLVVSFGEMLIDFVPDVAGLSLAESGGFVKAPGGAPANVACAIAKLGGSSAFVGKFGDDEFGHMLVNILKQNNVNSEGCLFDKHARTALAFVTLKHDGEREFMFYRNPSADMLLTEAELDLGLVRRARVFHYGSISLISEPCRSAHMAAMRAAKAAGVLCSYDPNVRLPLWPSPDAAREGILSIWKEADFIKVSDDEVAFLTRGDANDEKNVLSLWFDGLKLLVVTDGDKGCRYFTKDFKGSVSGFKVDTVDTTGAGDAFVGSLLVNVAKDDSIFHNEEKLREALKFSNACGAICTTKKGAIPALPTVATAQDLIAKAN

SEQ ID NO: 3593 - protein, 335 aa, Zea mays
  misc_feature (306)..(306): Xaa can be any naturally occurring amino acid
MAPLGDGGAAAAAASNNLVVSFGEMLIDFVPDVAGLSLAESGGFVKAPGGAPANVACAIAKLGGSSAFVGKFGDDEFGHMLVNILKQNNVNSEGCLFDKHARTALAFVTLKHDGEREFMFYRNPSADMLLTEAELDLGLVRRARVFHYGSISLISEPCRSAHMAAMRAAKAAGVLCSYDPNVRLPLWPSPDAAREGILSIWKEADFIKVSDDEVAFLTRGDANDEKNVLSLWFDGLKLLVVTDGDKGCRYFTKDFKGSVSGFKVDTVDTTGAGDAFVGSLLVNVAKDDSIFHNEEKLREALKFSNXCGAICTTKKGAIPALPTVATAQDLIAKAN

SEQ ID NO: 3594 - protein, 335 aa, Zea mays
  misc_feature (297)..(297): Xaa can be any naturally occurring amino acid
  misc_feature (305)..(305): Xaa can be any naturally occurring amino acid
MAPLGDGGAAAAAASNNLVVSFGEMLIDFVPDVAGLSLAESGGFVKAPGGAPANVACAIAKLGGSSAFVGKFGDDEFGHMLVNILKQNNVNSEGCLFDKHARTALAFVTLKHDGEREFMFYRNPSADMLLTEAELDLGLVRRARVFHYGSISLISEPCRSAHMAAMRAAKSAGVLCSYDPNVRLPLWPSPDAAREGILSIWKEADFIKVSDDEVAFLTRGDANDEKNVLSLWFDGLKLLVVTDGDKGCRYFTKDFKGSVSGFKVDTVDTTGAGDAFVGSLLVNVAKDDSIFHNEEKXREALKFSXACGAICTTKKGAIPALPTVATAQDLIAKAN

SEQ ID NO: 3595 - protein, 335 aa, Zea mays
MAPLGDGGAAAAAASNNLVVSFGEMLIDFVPDVAGLSLAESGGFVKAPGGAPANVAYAIAKLGGSSAFVGKFGDDEFGHMLVCVLKQNNVNSEGCLFDKHARTALAFVTLKHDGEREFMFYRNPSADMLLTEAELDLGLVRRARVFHYGSISLISEPCRSAHMAAMRAAKAAGVLCSYDPNVRLPLWPSPDAAREGILSIWKEADFIKVSDDEVAFLTRGDANDEKNVLSLWFDGLKLLVVTDGDKGCRYFTKDFKGSVSGFKVDTVDTTGAGDAFVGSLLVNVAKDDSIFHNEEKLREALKFSNACGAICTTKKGAIPALPTVATAQDLIAKAN

SEQ ID NO: 3596 - protein, 335 aa, Zea mays
  misc_feature (143)..(143): Xaa can be any naturally occurring amino acid
  misc_feature (324)..(324): Xaa can be any naturally occurring amino acid
MAPLGDGGAVAAAASNNLVVSFGEMLIDFVPDVAGLSLAESGGFVKAPGGAPANVACAIAKLGGSSAFVGKFGDDEFGHMLVNILKQNNVNSEGCLFDKHARTALAFVTLKHDGEREFMFYRNPSADMLLTEAELDLGLVRRXRVFHYGSISLISEPCRSAHMAAMRAAKAAGVLCSYDPNVRLPLWPSPDAAREGILSIWKEADFIKVSDDEVAFLTRGDANDEKNVLSLWFDGLKLLVVTDGDKGCRYFTKDFKGSVPGFKVDTVDTTGAGDAFVGSLLVNVAKDDSIFHNEEKLREALKFSNACGAICTTKKGAIPALPTXATAQDLIAKAN

SEQ ID NO: 3597 - protein, 336 aa, Oryza sativa Japonica Group
MAPLGDGAAAAAAAEPNLVVSFGEMLIDFVPDVAGVSLAESGGFVKAPGGAPANVACAISKLGGSSAFVGKFGDDEFGHMLVDILKKNGVNAEGCLFDEHARTALAFVTLKSNGEREFMFYRNPSADMLLTEAELNLDLIRRAKIFHYGSISLITEPCRSAHVAAMRAAKSAGILCSYDPNVRLPLWPSEDAARAGILSIWKEADFIKVSDDEVAFLTQGDANDEKNVLSLWFDGLKLLIVTDGEKGCRYFTKDFKGSVPGFSVNTVDTTGAGDAFVGSLLVNVAKDDSIFHNEEKLREALKFSNACGAICTTKKGAIPALPTVAVAQELISKAAN

SEQ ID NO: 3598 - protein, 335 aa, Oryza sativa Indica Group
MAPLGDGAAAAAAEPNLVVSFGEMLIDFVPDVAGVSLAESGGFVKAPGGAPANVACAISKLGGSSAFVGKFGDDEFGHMLVDILKKNGVNAEGCLFDEHARTALAFVTLKSNGEREFMFYRNPSADMLLTEAELNLDLIRRAKIFHYGSISLITEPCRSAHVAAMRAAKSAGILCSYDPNVRLPLWPSEDAARAGILSIWKEADFIKVSDDEVAFLTQGDANDEKNVLSLWFDGLKLLIVTDGEKGCRYFTKDFKGSVPGFSVNTVDTTGAGDAFVGSLLVNVAKDDSIFHNEEKLREALKFSNACGAICTTKKGAIPALPTVAVAQELISKAAN

SEQ ID NO: 3599 - protein, 336 aa, Hordeum vulgare subsp. vulgare
MAPLGDAVAPAAAAAPGLVVSFGEMLIDFVPDVAGVSLAESGGFVKAPGGAPANVACAVSKLGGSSAFVGKFGDDEFGHMLVEILKQNGVNAEGCLFDQHARTALAFVTLKANGEREFMFYRNPSADMLLTEAELNLDLIRRARIFHYGSISLITEPCRSAHVAAMRAAKSAGILCSYDPNVRLPLWPSAQAARDGIMSIWKEADFIKVSDDEVAFLTQGDANDEKNVLSLWFEGLKLLIVTDGEKGCRYFTKDFKGSVPGYSVNTVDTTGAGDAFVGSLLVNVSKDDSIFYNEAKLREVLQFSNACGAICTTKKGAIPALPTTATALELISKGSN

SEQ ID NO: 3600 - protein, 462 aa, Sorghum bicolor
MEKAIDRQRVLLRHLSPAAAAESPAPPAISASACAAGDSAAYHRTPAFADDVVIVAAYRTAICKAKRGGFKDTFAEDLLVPVFKALVDKTKLDPSEVGDIVVGTVLAPGSQRAIECRMAALYAGFPDTVPLKTVNRQCSSGLQAVADVATAIKAGLYDIGIAAGLESMTVNKVSLDGQVNPKVELFSQARDCLLPMGLTSENVAHRFGITRLEQDQAAVESHRKAAAAAAAGKFKEEIVPVHTKIVDPKTGEEKKIVVSADDGIRPDTSLAVLSKLKPAFSKDGTTTAGNASQVSDGAGAVLLMRRDVAMKKGLPILGVFRTFAAVGVDPAVMGIGPAVAIPAAVKAAGLQMDDIDLFEINEAFASQYVYCCKKLELDPAKVNVNGGAMALGHPLGCTGARCVSTLLNEMKRRGKDCRFGVISMCIGSGMGAAAVFERGDCVDELTNSRGIPTHNWLSKDAM

SEQ ID NO: 3601 - protein, 461 aa, Zea mays
MEKAVDRQRVLLRHLNPAAAGSPAPPAISASACAAGDSAAYHRRPAFADDVVIVAAYRTAICKAKRGGFKDTFAEDLLVPVFKALVDKTKLDPSEVGDIVVGTVLAPGSQRAIECRMAALYAGFPDTVPLKTVNRQCSSGLQAVADVATAIKAGLYDIGIAAGLESMTVNKVSLDGQANPKVELFSQARDCLLPMGLTSENVAHRFGITRLEQDQAAVESHRKAAAAAAAGKFKEEIVPVHTKIVDPKTGEEKKIVISADDGIRVDTSLAVLSKLKPAFSKDGSTTAGNASQVSDGAGAVLLMRRDVAMKKGLPVLGVFRTFAAVGVDPAVMGIGPAVAIPAAVKAAGLQMDDIDLFEINEAFASQYVYCCKKLKLDPAKVNVNGGAMALGHPLGATGARCVSTLLNEMKRRGKDCRFGVISMCIGSGMGAAAVFERGDGVDELTNARGISTHNWLSKDAM

SEQ ID NO: 3602 - protein, 461 aa, Oryza sativa Japonica Group
MEKAINRQRVLLAHLEPAASPAAAAPAITASACAAGDSAAYHRGACFADDVVIVAAYRTAICKSKRGGFKDTPAEDLLVPVFKALIDKTKLNPSEVGDIVVGTVLAPGSQRAIECRMAAFYAGFPDTVPLMTVNRQCSSGLQAVANVASNIKAGLYDIGIAAGLESMTVNQVRLDGQVNPKVELFSQARDCLLPMGLTSENVAKRFGITRMEQDQAAVESHRKAAAAAASGKFKEEIVPVHTKIVDPKTGEEKEIVVSADDGIRPGTSLAVLSKLKPAFSKDGTTTAGNASQVSDGAGAVLLMRRDIAMQKGLPIVGVFRSFAAVGVDPAIMGVGPAVAIPAAVKAAGLQIDDVDLFEINEAFASQYVYCCKKLGLDPAKVNVNGGAMALGHPLGATGARSVSTLLNEMKRRGKDCRFGVISMCIGSGMGAAAVFERGDAVDELTNARCIPTHNRLSKDAM

SEQ ID NO: 3603 - protein, 461 aa, Oryza sativa Indica Group
MEKAINRQRVLLAHLEPAASPAAAAPAITASACAAGDSAAYHRGACFADDVVIVAAYRTAICKSKRGGFKDTPAEDLLVPVFKALIDKTKLNPSEVGDIVVGTVLAPGSQRAIECRMAAFYAGFPDTVPLMTVNRQCSSGLQAVANVASNIKAGLYDIGIAAGLESMTVNQVRLDGQVNPKVELFSQARDCLLPMGLTSENVAKRFGITRMEQDQAAVESHRKAAAAAASGKFKEEIVPVHTKIVDPKNGEEKEIVVSADDGIRPGTSLAVLSKLKPAFSKDGTTTAGNASQVSDGAGAVLLMRRDIAMQKGLPIVGVFRSFAAVGVDPAVMGVGPAVAIPAAVKAAGLQIDDVDLFEINEAFASQYVYCCKKLGLDPAKVNVNGGAMALGHPLGATGARSVSTLLNEMKRRGKDCRFGVISMCIGSGMGAAAVFERGDAVDELTNARCIPTHNRLSKDAM

SEQ ID NO: 3604 - protein, 461 aa, Vitis vinifera
MEKAINRQRVLLQHLSPSSSAAEDESSLSASVCVAGDSAAYQRTSVFGDDVVIVAAYRTALCKSKRGGFKDTYPDDLLAPVLRALLEKTNLNPNEVGDIVVGTVLAPGSQRASECRMAAFYAGFPETVPVRTVNRQCSSGLQAVADVAAAIKAGFYDIGIGAGLESMTANPMAWEGSINPKVKEFVQAQDCLLPMGITSENVAHRFGVTRQEQDQAAVESHKRAAAATATGKFKDEIIPVSTKIVDPKTGDEKLVTISVDDGIRPNATMSDLAKLKPVFKKNGTTTAGNSSQVSDGAGAVLLMKRSVAMRKGLPILGVFRTFAAVGVDPAVMGIGPAVAIPAAVKSAGLELDDIDLFEINEAFASQFVYCRKKLDLDPEKINVNGGAMAIGHPLGATGARCVGTLLHEMKRRGKDCRFGVVSMCIGTGMGAAAVFERGDCVDELRNARTAENNNLLSKDAQ

SEQ ID NO: 3605 - protein, 461 aa, Vitis vinifera
MEKAINRQRVLLQHLSPSSSAAEDESSLSASVCVAGDSAAYQRTSVFGDDVVIVAAYRTALCKSKRGGFKDTYPDDLLAPVLRALIEKTNLNPNEVGDIVVGTVLAPGSQRASECRMAAFYAGFPETVPVRTVNRQCSSGLQAVADVAAAIKAGFYDIGIGAGLESMTANPMAWEGSINPKVKEFVQAQDCLLPMGITSENVAHRFGVTRQEQDQAAVESHKRAAAATATGKFKDEIIPVSTKIVDPKTGDEKPVTISVDDGIRPNAIMSDLAKLKPVFKKNGTTTAGNSSQVSDGAGAVLLMKRSVAMRKGLPILGVFRTFAAVGVDPAVMGIGPAVAIPAAVKSAGLELDDIDLFEINEAFASQFVYCRKKLDLDPEKINVNGGAMAIGHPLGATGARCVGTLLHEMKRRGKDCRFGVVSMCIGTGMGAAAVFERGDCVDELRNARTAENNNLLSKDAQ

SEQ ID NO: 3606 - protein, 461 aa, Zea mays
MEKAIDRQRVLLAHLLPSPSAASSQPQLAASACAAGDSAAYQRSSSFGDDVVVVAAYRTPICKAKRGGFKDTYPEDLLTVVLKAVLDNTRINPADIGDIVVGTVLGPGSQRANECRMAALFAGFPETVPVRTVNRQCSSGLQAVADVAAAIKAGYYDIGIGAGLESMSINSIAWEGQVNPKISAFQKAQDCLLPMGITSENVAHRYGVTRQEQDQAAAESHRRAAAATASGKFKDEIVPVPTKIVDPKTGEEKEVVISVDDGIRPGTTASGLAKLKPVFKKDGTTTAGNSSQVSDGAGAVLLMKRSVALKKGLPILGVFRSFAAVGVDPAVMGVGPAVAIPAAVKSAGLEIGDIDLFELNEAFASQFVYCCNKLGLDRSKVNVNGGAIALGHPLGATGARCVATLLNEMKRRGRDCRFGVVTMCIGSGMGAAAVFERGDAVDGLSNVRDIQAHNFLSKDAK

SEQ ID NO: 3607 - protein, 461 aa, Zea mays
MEKAIDRQRVLLAHLLPSPSAASSQPHLAASACAAGDSAAYQRSSSFGDDVVVVAAYRTPICKAKRGGFKDTYPEDLLTVVLKAVLDNTRINPADIGDIVVGTVLGPGSQRANECRMAALFAGFPETVPVRTVNRQCSSGLQAVADVAAAIKAGYYDIGIGAGLESMSINSIAWEGQVNPKISAFQKAQDCLLPMGITSENVAHRYGVTRQEQDQAAAESHRRAAAATASGKFKDEIVPVPTKIVDPKTGEEKEVVISVDDGIRPGTTASGLAKLKPVFKKDGTTTAGNSSQVSDGAGAVLLMKRSVALKKGLPILGVFRSFAAVGVDPAVMGVGPAVAIPAAVKSAGLEIGDIDLFELNEAFASQFVYCCNKLGLDRSKVNVNGGAIALGHPLGATGARCVATLLNEMKRRGRDCRFGVVTMCIGSGMGAAAVFERGDAVDGLSNVRDMQAHNFLSKDAK

SEQ ID NO: 3608 - protein, 460 aa, Populus trichocarpa
MEKAINRQRVLLEHLRPSSSHNFESTLSASACLAGDSAAYQRTSAYGDDVVIVAAYRTPQCKSKRGGFKDTHADDLLAPVLKALIEKTNLDPREVGDIVVGSVLAPGSQRASECRMAAFYAGFPETVPIRTVNRQCSSGLQAVADVAASIKAGFYEIGIGAGLESMTINQMSWDGDVNPKLKNFQKAQDCLLPMGITSENVAHRFGVTRQEQDQAAVDSHRKAAAATASGRFKDEIIPVATKIVDPKTGDEKPIVVSVDDGIRPETSVAGLGKLKTVFKKDGTTTAGNSSQISDGAGAVLLMKRSVAVQKGLPILGVFRTFAAVGVDPAIMGVGPAVAIPAAVKAAGLELEDIDLFEINEAFASQFVYCRKKLELDPQKINVNGGAMAIGHPLGATGARCVATLLHEMKRRGRDCRFGVVSMCIGTGMGAAAVFERGDGCDELCNARKVESNNLLSKDSR

SEQ ID NO: 3609 - protein, 463 aa, Petunia x hybrida
MERSIERQRVLLQHLRPSQTSSSLENLDSSISASVCSAGDSAAYQRTSVFGDDVVIVAAYRTPLCKAKRGSFKDTYPDDLLAPVLKALMEKTNVSPSEVGDIVVGTVLAPGSQRASECRMAAFYAGFPETVPVRTVNRQCSSGLQAVADVAAAIKAGFYDIGIGAGLESMTTNPRLGRFSNPKVKTMAQAQDCLLPMGVTSENVAHRFGVTRQEQDQAAVDSHRKAAAATASGKFKDEIIPVATKIVDPKTGDETPVTISVDDGIRPNASVSDLAKLRPVFKKDGTTTAGNSSQVTDGAGAVLLMKRSLAMQKGLPILGVFRTFAAVGVDPAIMGIGPAVAIPAAVKSAGLELEDIDLFEINEAFASQYVYCRKKLELDPEKINVNGSAMALGHPLGATGARCVATLLHEMKRRGKDCRFGVVSMCIGTGMGAAAVFERGDSCDELRNARKIDSHNLLSKDAL

SEQ ID NO: 3610 - protein, 304 aa, Sorghum bicolor
MDIDLFADIDLDALLASFSGEPAAVSDLIVPSPPPPAPAAHDAAEAGSPESVTSRANPAGEVGLSEIERFLMQEGEAEAELGGEVEGISVDQFFDALYDGGEGKDEGEAEAGASTDADSGRDEVVEVVTPEAETVEVDGDDPVSKKKKRQMRNRDSAMKSRERKKSYIKDLETKSKYLEAECRRLSYALQCYAAENMVLRQSLMKDRPVGAPTAMQESAVLTETLPLVSLLWLVSIVCLFLMPVLPNRSPAAPSSGGRDLVMAAGKTSSETPEILELILHGRRCKSTRARIKLYNLPFHPVIAC

SEQ ID NO: 3611 - protein, 300 aa, Zea mays
MDIDLFPDIDLDALLASFSGDPAAVSGLIIPSPPPPAPATAHDAEAGSPESVTSRTNPLGEVALSEIERLLMQEGEAELGGEVDGISVDQFFDALYDGEEAKGEREAGASADVDSGRDDVLEVVTPEAGTVEVDGDDPISKKKMRQMRNRDSAMKSRERKKSYIKDLETKSKHLEAECRRLSYALQCYAAENMALRQSLLKDRPLGAPTATQESAVLTETLPLVSLLWLVSIVCLFLMPVLPNRSPAAPSSGGRDLVMAAGKTSSETPEILELILHGRRCKSTRAKIKLCILPFHAGAAC

SEQ ID NO: 3612 - protein, 300 aa, Zea mays
MDIDLFPDIDLDALLASFSGDPAAVSGLIIPSPPPPAPATAHDVEAGSPESVTSRTNPLGEVALSEIERLLMQEGEAELGGEVDGISVDQFFDALYDGGEAKDEREAGASADADSGRDEALEVVTPEAGTVEVDGDDPISKKKMRQMRNRDSAMKSRERKKSYIKDLETKSKHLEAECRRLSYALQCYAAENMALRQSLLKDRPLGAPTATQESAVLTETLPLVSLLWLVSIVCLFLMPVLPNRSPAAPSSGGRDLVMAAGKTSTETPEIRELILHGRRCKSTRAKIKLCILPFHAGAAC

SEQ ID NO: 3613 - protein, 709 aa, Sorghum bicolor
MITFVDSAAMERERESDRCLDPQLWHACAGGMVQMPPVHSKVYYFPQGHAEHAQGPVVDLPAGRVPALVLCRVAAVRFMADPDTDEVFAKIRLAPVRPNEPGYAADADDAIGAAAAGGGAQEDKPASFAKTLTQSDANNGGGFSVPRYCAETIFPRLDYSADPPVQTVLAKDVHGVVWKFRHIYRGTPRRHLLTTGWSTFVNQKKLVAGDSIVFMRTENGDLCVGIRRAKKGGIGGPEFLHHHQPPPPPGGGGYAGFSMFLRGGEEDGSKMMATGAATRGNKVRVRVRPEEVVEAANLAVSGQPFEVVYYPRASTPEFCVKAGAVRAAMRTQWCAGMRFKMAFETEDSSRISWFMGTVSAVQVADPIRWPNSPWRLLQVAWDEPDLLQNVKRVSPWLVELVSNMPAIHHLTPFSPPPRKKLCVPLYPELPLEGHQFPAPMFHGSPLGRGVGPMCYFPDGTPAGIQGARHAQFGISLSDLHLDKLQSSLSPHGLHHHQLDGHGVQPRIAAGLIIGHPAAARDDISCLLTIGTTPQNRKPSSDVKKAAAAAPQLMLFGKPILTEQQISLGNVAGFPAPKKSPSDDVAERTVSNSDVSSPGSNHGGSSRSSGGAPSCQDNKVPDLGLETGHCKVFMQSEDVGRTLDLSAVGSYEELYQRLADMFGIDKTELMSHVFYRDDASGALKHTGDKPFSEFTKTARRLTILTDAEQR

SEQ ID NO: 3614 - protein, 700 aa, Oryza sativa Japonica Group
MITFVDSAAKERERESDKCLDPQLWHACAGGMVQMPPVSSKVYYFPQGHAEHAQGHGPVEFPGGRVPALVLCRVAGVRFMADPDTDEVFAKIRLVPVRANEQGYAGDADDGIGAAAAAAAQEEKPASFAKTLTQSDANNGGGFSVPRYCAETIFPRLDYSADPPVQTVLAKDVHGVVWKFRHIYRGTPRRHLLTTGWSTFVNQKKLVAGDSIVFMRTENGDLCVGIRRAKKGGVGGPEFLPPPPPPPPTPAAGGNYGGFSMFLRGDDDGNKMAAAARGKVRARVRPEEVVEAANLAVSGQPFEVVYYPRASTPEFCVKAGAVRAAMRTQWFAGMRFKMAFETEDSSRISWFMGTVSAVQVADPIRWPNSPWRLLQVSWDEPDLLQNVKRVSPWLVELVSNMPAIHLAPFSPPRKKLCVPLYPELPIDGQFPTPMFHGNPLARGVGPMCYFPDGTPAGIQGARHAQFGISLSDLHLNKLQSSLSPHGLHQLDHGMQPRIAAGLIIGHPAARDDISCLLTIGSPQNNKKSDGKKAPAQLMLFGKPILTEQQISLGDAASVDVKKSSSDGNAENTVNKSNSDVSSPRSNQNGTTDNLSCGGVPLCQDNKVLDVGLETGHCKVFMQSEDVGRTLDLSVVGSYEELYRRLADMFGIEKAELMSHVFYRDAAGALKHTGDEPFSEFTKTARRLNILTDTSGDNLAR

SEQ ID NO: 3615 - protein, 700 aa, Oryza sativa
MITFVDSAAKERERESDKCLDPQLWHACAGGMVQMPPVSSKVYYFPQGHAEHAQGHGPVEFPGGRVPALVLCRVAGVRFMADPDTDEVFAKIRLVPVRANEQGYAGDADDGIGAAAAAAAQEEKPASFAKTLTQSDANNGGGFSVPRYCAETIFPRLDYSADPPVQTVLAKDVHGVVWKFRHIYRGTPRRHLLTTGWSTFVNQKKLVAGDSIVFMRTENGDLCVGIRRAKKGGVGGPEFLPPPPPPPPTPAAGGNYGGFSMFLRGDDDGNKMAAAARGKVRARVRPEEVVEAANLAVSGQPFEVVYYPRASTPEFCVKAGAVRAAMRTQWFAGMRFKMAFETEDSSRISWFMGTVSAVQVADPIRWPNSPWRLLQVSWDEPDLLQNVKRVSPWLVELVSNMPAIHLAPFSPPRKKLCVPLYPELPIDGQFPTPMFHGNPLARGVGPMCYFPDGTPAGIQGARHAQFGISLSDLHLNKLQSSLSPHGFHQLDHGMQPRIAAGLIIGHPAARDDISCLLTIGSPQNNKKSDGKKAPAQLMLFGKPILTEQQISLGDAASVDVKKSSSDGNAENTVNKSNSDVSSPRSNQNGTTDNLSCGGVPLCQDNKVLDVGLETGHCKVFMQSEDVGRTLDLSVVGSYEELYRRLADMFGIEKAELMSHVFYRDAAGALKHTGDEPFSEFTKTARRLNILTDTSGDNLAR

SEQ ID NO: 3616 - protein, 627 aa, Oryza sativa Indica Group
MITFVDSAAKERERESDKCLDPQLWHACAGGMVQMPPVSSKVYYFPQGHAEHAQGHGPVEFPGGRVPALVLCRVAGVRFMADPDTDEVFAKIRLVPVRANEQGYAGDADDGIGAAAAAAAQEEKPASFAKTLTQSDANNGGGTFVNQKKLVAGDSIVFMRTENGDLCVGIRRAKKGGVGGPEFLPPPPPPPPPTPAAGGNYGGFSMFLRGDDDGNKMAAAARGKVRARVRPEEVVEAANLAVSGQPFEVVYYPRASTPEFCVKAGAVRAAMRTQWFAGMRFKMAFETEDSSRISWFMGTVSAVQVADPIRWPNSPWRLLQVSWDEPDLLQNVKRVSPWLVELVSNMPAIHLAPFSPPRKKLCVPLYPELPIDGQFPTPMFHGNPLARGVGPMCYFPDGTPAGIQGARHAQFGISLSDLHLNKLQSSLSPHGLHQLDHGMQPRIAAGLIIGHPAARDDISCLLTIGSPQNNKKSDAKKAPAQLMLFGKPILTEQQISLGDAASVAVKKSSSDGNAENTVNKSNSDVSSPRSNQNGTTDNLSCGGVPLCQDNKVLDVGLETGHCKVFMQSEDVGRTLDLSVVGSYEELYRRLADMFSIEKAELMSHVFYRDAAGALKHTGDEPFRSVQF

SEQ ID NO: 3617 - protein, 630 aa, Oryza sativa Japonica Group
MITFVDSAAKERERESDKCLDPQLWHACAGGMVQMPPVSSKVYYFPQGHAEHAQGHGPVEFPGGRVPALVLCRVAGVRFMADPDTDEVFAKIRLVPTVLAKDVHGVVWKFRHIYRGTPRRHLLTTGWSTFVNQKKLVAGDSIVFMRTENGDLCVGIRRAKKGGVGGPEFLPPPPPPPPTPAAGGNYGGFSMFLRGDDDGNKMAAAARGKVRARVRPEEVVEAANLAVSGQPFEVVYYPRASTPEFCVKAGAVRAAMRTQWFAGMRFKMAFETEDSSRISWFMGTVSAVQVADPIRWPNSPWRLLQVSWDEPDLLQNVKRVSPWLVELVSNMPAIHLAPFSPPRKKLCVPLYPELPIDGQFPTPMFHGNPLARGVGPMCYFPDGTPAGIQGARHAQFGISLSDLHLNKLQSSLSPHGLHQLDHGMQPRIAAGLIIGHPAARDDISCLLTIGSPQNNKKSDGKKAPAQLMLFGKPILTEQQISLGDAASVDVKKSSSDGNAENTVNKSNSDVSSPRSNQNGTTDNLSCGGVPLCQDNKVLDVGLETGHCKVFMQSEDVGRTLDLSVVGSYEELYRRLADMFGIEKAELMSHVFYRDAAGALKHTGDEPFSEFTKTARRLNILTDTSGDNLAR

SEQ ID NO: 3618 - protein, 429 aa, Phragmites australis
MAQPVVPAMQCQVGARGKAAVRARPAGAGGRVWGVKRSGRGTSGFKVMAVSTESTGVVPRLEQLLNMDTKPFTDKIIAEYIWVGGSGIDLRSKSRTLSKPVEDPSELPKWNYDGSSTGQAPGEDSEVILYPQAIFKDPFRGGNNILVICDTYTPAGEPIPTNKRHRAAQIFSDPKVVDQVPWFGIEQEYTLLQTDVNWPLGWPVGGYPGPQGPYYCAVGADKSFGRDISDAHYKACLYAGINISGTNGEVMPGQWEYQVGPSVGIEAGDHIWISRYILERITEQAGIVLTLDPKPIQGDWNGAGCHTNYSTKSMREDGGFEVIKKAILNLSLRHDLHISAYGEGNERRLTGLHETASIDNFSWGVANRGCSIRVGRDTEAKGKGYLEDRRPASNMDPYVVTSLLAETTILWEPTLEAEALATKKLALKV

SEQ ID NO: 3619 - protein, 428 aa, Oryza sativa Japonica Group
MAQAVVPAMQCQVGAVRARPAAAAAAAGGRVWGVRRTGRGTSGFRVMAVSTETTGVVTRMEQLLNMDTTPFTDKIIAEYIWVGGTGIDLRSKSRTISKPVEDPSELPKWNYDGSSTGQAPGEDSEVILYPQAIFKDPFRGGNNILVMCDTYTPAGEPIPTNKRNRAAQVFSDPKVVSQVPWFGIEQEYTLLQRDVNWPLGWPVGGYPGPQGPYYCAVGSDKSFGRDISDAHYKACLYAGINISGTNGEVMPGQWEYQVGPSVGIEAGDHIWISRYILERITEQAGVVLTLDPKPIQGDWNGAGCHTNYSTKSMREDGGFEVIKKAILNLSLRHDLHISAYGEGNERRLTGLHETASIDNFSWGVANRGCSIRVGRDTEAKGKGYLEDRRPASNMDPYVVTALLAETTILWEPTLEAEVLAAKKLALKV

SEQ ID NO: 3620 - protein, 429 aa, Phragmites australis
MAQAVVPAMQCQVGVKAAVRARPAAAGAGGRVWGVRRSGRGTSGFKVMAMGMSTSGVVPRLEQLLNMDTKPYTDNIIAEYIWVGGSGIDVRSKSRTISKPVEDPSELPKWNYDGSSTGQAPGEDSEVILYPQAIFKDPFRGGNNILVICDTYTPAGEPIPTNKRHRAAQIFSDPKVVSQVPWFGIEQEYTLLQTDVNWPLGWPVGGYPGPQGPYYCAVGADKSFGRDISDAHYKPCLYAGINISGTNGEVMPGQWEYQVGPSVGIEAGDHIWISRYILERITEQAGVVLTLDPKPIQGDWNGAGCHTNYSTKSMREDGGFEVIKKAILNLSLRHDLHISAYGEGNERRLTGLHETASIDNFSWGVANRGCSIRVGRDTEAKGKGYLEDRRPASNMDPYVVTSLLAETTILWEPTLEVEALAAKKLALKV

SEQ ID NO: 3621 - protein, 427 aa, Triticum aestivum
MAQAVVPAMQCQVGVRGRSAVPARQPAGRVWGVRRTARATSGFKVLALGPETTGVIQRMQQLLDMDTTPFTDKIIAEYIWVGGSGIDLRSKSRTISKPVEDPSELPKWNYDGSSTGQAPGEDSEVILYPQAIFKDPFRGGNNILVICDTYTPQGEPIPTNKRHMAAQIFSDPKVTAQVPWFGIEQEYTLMQRDVNWPLGWPVGGYPGPQGPYYCAVGSDKSFGRDISDAHYKACLYAGIEISGTNGEVMPGQWEYQVGPSVGIDAGDHIWASRYILERITEQAGVVLTLDPKPIQGDWNGAGCHTNYSTLSMREDGGFDVIKKAILNLSLRHDLHIAAYGEGNERRLTGLHETASISDFSWGVANRGCSIRVGRETEAKGKGYLEDRRPASNMDPYTVTALLAETTILWEPTLEAEALAAKKLALKV

SEQ ID NO: 3622 - protein, 435 aa, Hordeum vulgare subsp. vulgare
VSKYVETTMAQAVVQAMQCQVGVRGRTAVPARQPAGRVWGVRRAARATSGFKVLALGPETTGVIQRMQQLLDMDTTPFTDKIIAEYIWVGGSGIDLRSKSRTISKPVEDPSELPKWNYDGSSTGQAPGEDSEVILYPQAIFKDPFRGGNNILVICDTYTPQGEPIPTNKRHMAAQIFSDPKVTSQVPWFGIEQEYTLMQRDVNWPLGWPVGGYPGPQGPYYCAVGSDKSFGRDISDAHYKACLYAGIEISGTNGEVMPGQWEYQVGPSVGIDAGDHIWASRYILERITEQAGVVLTLDPKPIQGDWNGAGCHTNYSTLSMREDGGFDVIKKAILNLSLRHDLHIAAYGEGNERRLTGLHETASISDFSWGVANRGCSIRVGRDTEAKGKGYLEDRRPASNMDPYTVTALLAETTILWEPTLEAEALAAKKLALKV

SEQ ID NO: 3623 - protein, 427 aa, Triticum aestivum
MAQAVVPAMQCQVGVRGRSAVPARQPAGRVWGVRRTARAASGFKVLALGPETTGVIQRMQQLLDMDTTPFTDKIIAEYIWVGGSGIDLRSKSRTISKPVEDPSELPKWNYDGSSTGQAPGEDSEVILYPQAIFKDPFRGGNNILVICDTYTPQGEPIPTNKRHMAAQIFSDPKVTSQVPWFGIEQEYTLMQRDVNWPLGWPVGGYPGPQGPYYCAVGSDKSFGRDISDAHYKACLYAGIEISGTNGEVMPGQWEYQVGPSVGIDAGDHIWASRYILERITEQAGVVLTLDPKPIQGDWNGAGCHTNYSTLSMREDGGFDVIKKAILNLSLRHDLHIAAYGEGNERRLTGLHETASISDFSWGVANRGCSIRVGRETEAKGKGYLEDRRPASNMDPYTVTALLAETTILWEPTLEAEALAAKKLALKV

SEQ ID NO: 3624 - protein, 427 aa, Triticum aestivum
MAQAVVPAMQCQVGVRGRSAVPARQPAGRVWGVRRTARAASGFKVLALGPETTGVIQRMQQLLDMDTTPFTDKIIAEYIWVGGSGIDLRSKSRTISKPVEDPSELPKWNYDGSSTGQAPGEDSEVILYPQAIFKDPFRGGNNILVICDTYTPQGEPIPTNKRHMAAQIFSDPKVTAQVPWFGIEQEYTLMQRDVNWPLGWPVGGYPGPQGPYYCAVGSDKSFGRDISDAHYKACLYAGIEISGTNGEVMPGQWEYQVGPSVGIDAGDHIWASRYILERITEQAGVVLTLDPKPIQGDWNGAGCHTNYSTLSMREDGGFDVIKKAILNLSLRHDLHIAAYGEGNERRLTGLHETASISDFSWGVANRGCSIRVGRETEAKGKGYLEDRRPASNMDPYTVTALLAETTILWEPTLEAEALAAKKLALKV

SEQ ID NO: 3625 - protein, 426 aa, Hordeum vulgare subsp. vulgare
AQAVVQAMQCQVGVRGRTAVPARQPAGRVWGVRRAARATSGFKVLALGPETTGVIQRMQQLLDMDTTPFTDKIIAEYIWVGGSGIDLRSKSRTISKPVEDPSELPKWNYDGSSTGQAPGEDSEVILYPQAIFKDPFRGGNNILVICDTYTPQGEPIPTNKRHMAAQIFSDPKVTSQVPWFGIEQEYTLMQRDVNWPLGWPVGGYPGPQGPYYCAVGSDKSFGRDISDAHYKACLYAGIEISGTNGEVMPGQWEYQVGPSVGIDAGDHIWASRYILERITEQAGVVLTLDPKPIQGDWNGAGCHTNYSTLSMREDGGFDVIKKAILNLSLRHDLHIAAYGEGNERRLTGLHETASISDFSWGVANRGCSIRVGRDTEAKGKGYLEDRRPASNMDPYTVTALLAETTILWEPTLEAEALAAKKLALKV

SEQ ID NO: 3626 - protein, 435 aa, Hordeum vulgare subsp. vulgare
VSKYVETTMAQAVVQAMQCQVGVRGRTAVPARQPAGRVWGVRRAARATSGFKVLALGPETTGVIQRMQQLLDMDTTPFTDKIIAEYIWVGGSGIDLRSKSRTISKPVEDPSELPKWNYDGSSTGQAPGEDSEVILYPQATFKDPFRGGNNILVICDTYTPQGEPIPTNKRHMAAQIFSDPKVTSQVPWFGIEQEYTLMQRDVNWPLGWPVGGYPGPQGPYYCAVGSDKSFGRDISDAHYKACLYAGIEISGTNGEVMPGQWEYQVGPSVGIDAGDHIWASRYILERITEQAGVVLTLDPKPIQGDWNGAGCHTNYSTLSMREDGGFDVIKKAILNLSLRHDLHIAAYGEGNERRLTGLHETASISDFSWGVANRGCSIRVGRDTEAKGKRYLEDRRPASNMDPYTVTALLAETTILWEPTLEAEALAAKKLALKV

SEQ ID NO: 3627 - protein, 451 aa, Oryza sativa Japonica Group
MAQAVVPAMQCQVGAVRARPAAAAAAAGGRVWGVRRTGRGTSGFRVMAVSTETTGVVTRMEQLLNMDTTPFTDKIIAEYIWVGGTGIDLRSKSRTISKPVEDPSELPKWNYDGSSTGQAPGEDSEVILYPQAIFKDPFRGGNNILVMCDTYTPAGEPIPTNKRNRAAQVFSDPKVVSQVPWFGIEQEYTLLQRDVNWPLGWPVGGYPGPQGPYYCAVGSDKSFGRDISDAHYKACLYAGINISGTNGEVMPGQWEYQVGPSVGIEAGDHIWISRYILERITEQAGVVLTLDPKPIQADSVICFVIRLRLILQITKSMREDGGFEVIKKAILNLSLRHDLHISAYGEGNERRLTGLHETASIDNFSWGVANRGCSIRVGRDTEAKGKGYLEDRRPASNMDPYVVTALLAETTILWEPTLEAEVLAAKKLALKFLENHATFHSPVNILVEHHT

SEQ ID NO: 3628 - protein, 715 aa, Zea mays
MAGAPSSLARLLLLLLLAAGCLLPLVADAARLTLSLAPAADALLRLKAGIKDDGGALGSWSPDTSPCADGGPSWKGVLCNKDGVHGLQLEGMGLSGTLDLRALTSLPGPGLRTLSFMNNEFAGPLPNVKELSGLRAVFLSENKFSGVIPADAFAGMGSLKKVVLSNNDFTGPIPASLADAPRLLELRLNDNKFQGKIPDLKQEELTEVNLANNELEGEIPASLKSMTSDMFAGNKKLCGPPLGAKCEAPPTPSPKAHPQASVKEGTTPSQAAADTVASTGASSADDPKQDEGQEPVEGSISFGVSAALLGTLLIAGVAFIALRRRRGYKTKNFGPTASSSRPSGPPRVEPHPPAAKAPAAAGGVAHGGGAARKAEQGRLTFVRDDRGRFFELQDLLKATAEVLGAANLGVCYRATLTTGQSVVVKRFKEMNRVGREDFEEHMRRLGRLSHPNLLPLVAYYYRKEEKLLIHDYVPNRSLANLLHGGGESGGMKKAAVHWAARLKIVKGVARALSYLYDELCMLTVPHGHLKSSNILLDAHHGPLLTDYALVPVMNQSHAAQLMVAFKSPERKQFGRSSKKSDVWCLGLLILEILTGRPPTYDPPKAAAPSGELSSSQQKPGPAAGNTDLVTVVGSTPEGEWLNTVVDRDLRGEEEEDKEEMVKLIRVGMACCESNVDNRWELKTAIERIEELKAKERPDEEQATVIDEDYSDVALN

SEQ ID NO: 3629 - protein, 750 aa, Zea mays
MAGVPSSLARLYFLLLPLATGCLLLLSAEAARLPLSLAPADAAADALLRLKAGINDSGGALGSWSPDTSPCGDGDGGGASWKGVMCNRDGVHGLQLEGMGLSGVLDLRALTSLPGPGLRTLSFMDNDFAGPLPDVKALSGLRALFLSGNKFSGVIPADAFAGMGSLKKVVLSNNDFTGPIPASLADAPRLLELQLNGNKFQGKIPDLKQDELTAVNLANNELEGEIPPSLKFTPPDMFAGNTKLCGPPLGVKCEAPPPPSASPSPSPPPSPKTPPPASVKEGTTPSQPAADTVASTGASSADDAKQDEGHKPVEGSTSTSFGVLAAFIGTLGIAGVAFVALRRRRGYKTKNFGPTASSARPSDPPRVEPHPPAAKAEASAAQAPPAAAGCVARAGGAARKVEQGRLTFVRDDRGRFFELQDLLKATAEVLGTANLGVCYCATLTTGHSVVVKRFKEMNRVGKEDFEEHMRRLGRLSHPNLLPLVAYYYRKEEKLLIHDYVPNRSLANLLHGGGDERGMKKAALHWAARLKIVKGVARALSYLYDELCMLTVPHGHLKSSNILLDGHYEPLLTDYALVPVMNQSHAAQLMVAFKSPERKQFGRSSKKSDVWCLGLLILEMLTGKPPTYDLPKAAGAVPSAESLSSPQKPGPAAGNGTDLVTVVGSTPEGEWLDTVVDPDLRGEEEEDKEEMVKLIRVGMACCESNVDSRWELKTAIDKIEELKAKERPAPDEEQAFYSTVNNEDFNDVAIN

SEQ ID NO: 3630 - protein, 741 aa, Sorghum bicolor
MARVPSLLLARLIFLLLLLLVADAARLPLSLAPGDDAAASDALLKLKAGIKDEDGALGSWSPDTSPCGGDGNGGGTTWMGVMCNKDGVHGLQLEGLGLSGKLDLRALKSLPGPGLRTLSFMDNEFAGPLPDVKELSGLRAVFLSGNKFSGVIPADAFAGMGSLKKVVLSNNEFTGPIPPSLADAPRLLELQLNDNKFQGKIPDLKQGELTQVNLANNELEGEIPASLKSMSPDMFAGNKKLCGPPLGAKCEAPPPPSPSPKAPPPSQSPKAPPATSAKEGTTPSVPAADIVGSTGASSADDAKQDEAQKPAEGSTSFGVLAAFLGALAIAGVAFVALRRRSGYKNKNFGPTASSARPSGPPRVEPHPPAAKAQASAAQATGAADGSVSRGGGAARKVEQGRLTFVREDRGRFFELQDLLKATAEVLGTANLGVCYCATLTSGHSVVVKRFKEMNRVGREDFEEHMRRLGRLSHPNLLPLVAYYYRKEEKLLIHDYVPNRSLANLLHGGGEGCGMKKAAVHWAARLKIVKGVARALSYLYDELGMLTVPHGHLKSSNILLDGHYEPLLTDYALVPVMNQSHAAQLMVAFKAPERKQFGRSSKKSDVWCLGLLILEMLTGKQPSYDLHKPSGESSSSSPPQKPGPAAGNTTDLVTVVASTPEGEWLDTVVDPDLRGEEEEDKQEMVKLIRVGMACCETNVDSRWELRTAIDRIEELKAKERPDEEQAFYTTVNEEEYSDVAIN

SEQ ID NO: 3631 - protein, 335 aa, Zea mays
  misc_feature (305)..(306): Xaa can be any naturally occurring amino acid
MAPLGDGGAAAAAASNNLVVSFGEMLIDFVPDVAGLSLAESGGFVKAPGGAPANVACAIAKLGGSSAFVGKFGDDEFGHMLVNILKQNNVNAEGCLFDKHARTALAFVTLKHDGEREFMFYRNPSADMLLTEAELDLGLVRRARVFHYGSISLISEPCRSAHMAAMRAAKAAGVLCSYDPNVRLPLWPSPDAAREGILSIWKEADFIKVSDDEVAFLTRGDANDEKNVLSLWFDGLKLLVVTDGDKGCRYFTKDFKGSVPGFKVDTVDTTGAGDAFVGSLLVNVAKDDSIFHNEEKLREALKFSXXCGAICTTKKGAIPALPTVATAQDLIAKAN

SEQ ID NO: 3632 - protein, 336 aa, Oryza sativa Japonica Group; identical to SEQ ID NO: 3597

SEQ ID NO: 3633 - protein, 174 aa, Zea mays
MLATTCSRPPCPCPCPCARSRRLPAATFGGTSSAKRRAPRRAAAAVRCGLLPVDPWAPTMDSQSVASQLFAVSLFPYLGFLYFMTRSKTAPGLTLFGFYFLLVFVGATIPAGIYAKVHYGTSLSNVDWLHGGAESLLTLTNLFIVLGLRGALRKLEEEGTDESVSEASQEKSSV

SEQ ID NO: 3634 - protein, 171 aa, Zea mays
MLATTCSRPPCPCARSRRLPAATFSARRTSSAKQRAPRRAAALRCGLLPVDPWAPTMDSQSVASQLFAVSLFPYLGFLYFMTRSKTAPGLTLFGFYFLLVFVGATIPAGIYAKVHYGTSLSNVDWLHGGAESLLTLTNLFIVLGLRGALRKLEEEGTDEIVSEASQEKSSV

SEQ ID NO: 3635 - protein, 175 aa, Zea mays
MLATTCSRPPCPCPCARSRRLPAATFGGTSSAKRRAPRRAAAAVRCGLLPVDPWAPTMDSQSVASQLFAVSLFPYLGFLYFMTRSKTAPGLTLFGFYFLLVFVGATIPAGIYAKVHYGTSLSNVDWLHGGAESLLTLTNLFIVLGLRGALRKLEEEGTDEIVSEASQDSAEKSSV

SEQ ID NO: 3636 - protein, 168 aa, Zea mays
MLATTCSRPPCPCPCPCARSRRLPAATFGGTSSAKRRAPRRAAAAVRCGLLPVDPWAPTMDSQSVASQLFAVSLFPYLGFLYFMTRSKTAPGLTLFGFYFLLVFVGATTKVHYGTSLSNVDWLHGGAESLLTLTNLFIVLGLRGALRKLEEEGTDESVSEASQEKSSV

SEQ ID NO: 3637 - protein, 165 aa, Zea mays
MLATTCSRPPCPCARSRRLPAATFSARRTSSAKQRAPRRAAALRCGLLPVDPWAPTMDSQSVASQLFAVSLFPYLGFLYFMTRSKTAPGLTLFGFYFLLVFVGATTKVHYGTSLSNVDWLHGGAESLLTLTNLFIVLGLRGALRKLEEEGTDEIVSEASQEKSSV

SEQ ID NO: 3638 - protein, 175 aa, Oryza sativa Indica Group
MLPTTCRAPPCPWPRPLAAGRARGGYGLGRARGVKRRAAAARGMVVRCGLLPVDPWAPTMDSQSVASQLFAVSLFPYLGFLYFMTRSKTAPGLTLFGFYFLLAFVGATIPAGIYAKVHYGTSLSNVDWLHGSAESLLTLTNLFIVLGLRGALRKLEDTKESASEESQDIKEKGSI

SEQ ID NO: 3639 - protein, 174 aa, Sorghum bicolor
MLATTCGAPPCPCARSRRPPTAAFGGGYGIGRTRRSTRPRALRRAGVVRCGLLPVDPWAPTMDSQSVASQLFAVSLFPYLGFLYFMTRSKTAPGLTLFGFYFLLVFVGATTKVHYGTSLSNVDWLHGSAESLLTLTNLFIVLGLRGALRKLEEEEDTNGRVSEASQDSKEKSSV

SEQ ID NO: 3640 - protein, 169 aa, Oryza sativa Japonica Group
MLPTTCRAPPCPWPRPLAAGRARGGYGLGRARGVKRRAAAARGMVVRCGLLPVDPWAPTMDSQSVASQLFAVSLFPYLGFLYFMTRSKTAPGLTLFGFYFLLAFVGATTKVHYGTSLSNVDWLHGSAESLLTLTNLFIVLGLRGALRKLEDTKESASEESQDIKEKGSI

SEQ ID NO: 3641 - protein, 177 aa, Hordeum vulgare subsp. vulgare
MLAATAACRAPARPLPAARPGSSYLLGRVLLPKRRAPAVRRRGRSAAVRCGLLPVDPWAPGVDSQSIASQLFAVSLFPYLGFLYFMTRSKTAPGLTLFGFYFLLAFVGATIPAGIYAKVHYGTSLSNVDLLHGTAESLLTLTNLFIVLGLRGALRNLDKAEESSPEAPRDSKEKSSV

SEQ ID NO: 3642 - protein, 128 aa, Zea mays; identical to SEQ ID NO: 1057

SEQ ID NO: 3643 - protein, 443 aa, Sorghum bicolor
MDIDLDRARALRVVGRGAMGTVFLVAEDGPSALRPSRYALKVFDKRSGSSKPDADRRARWEINVLSRLAHPHLPSLLGFTETDDLLAWAVPYCSGGDLNELRYSLPDRVFSPAAIRFYIAEIVSAVAELHAAGVVYRDLKPENVLLRADGHVTLTDFDLSRLLQPSRSADSSSSPPPASSRGHHHNHRRSRVPARSDSMLGQAKSYSKPPHQPWSATASPRQQLQSLVRYIMGSGGDGAGVGRKSKSARVSPVSRKPASFGGCGSGASTTAAGWGKSYSFVGTEEYVAPEMVRGEGHGFAVDWWAVGVLVYEMAFGKTPFKGQNRKETFRNVVQREVEFPGDSLRRTPELADLISGLLERDPRRRLGYAGGADEIRAHPFFAGVAWDMLTEVSRPPYIPPPADEDLAEGEGFDVRGHFKDLHQPPPTKSASESSSSSEFSTEF

SEQ ID NO: 3644 - protein, 442 aa, Zea mays
MDIDLDRARALRILGRGAMGTVFLVAEGPSALRPSRYALKVFDKRSAARSRKPDADRRARWEISVLSRLAHPHLPSLLGFTETDDLLAWAVPYCSGGDLNELRYSLPDRIFSPAAIRFYIAEIVSAVAELHAAGVVYRDLKPENVLLRADGHVTLTDFDLSRLLHPSRSSAESSSPPRPASSRGHHNRRSRVPARSDSVLSQQVKSYSNSNNSRPPHQPWSAASSPRQQLQSLVRYIMGSGDGAGVGRKSKSARVSPLSRKPASFGGSSSAAAWGKSYSFVGTEEYVAPEMVRGEGHGFAVDWWAVGVLAYEMAFGRTPFKGQNRKETFRNVLQQELEFPGDTRWRTPELADLISGLLERDPRRRLGYAGGADEVRAHPFFAGVAWDMLTEVSRPPYIPPPADEDLADVEGFDVRGHFKDLHQPPPPKSASESSSSEFSTEF

SEQ ID NO: 3645 - protein, 438 aa, Zea mays; identical to SEQ ID NO: 1058

SEQ ID NO: 3646 - protein, 440 aa, Zea mays
MPLAPLMEIDLHAVRAVRVLGRGAMGTVFLAVNGAGGEAYALKVFDKRSPAVASRPSAGTDAARRARWEVSVLSRLAHPHLPSLLGCAETPDLLAWALPYCPGGDLNELRHAQPDRVFSPAAIRFYVAEVVSALAELHAAGIAYRDLKPENVLLRADGHVTLTDFDLSRQLPPRSPSAASTSTSSSCSATSSPPPQAQSHGRSQHRHVKNIFKRSESAVTASTSGQEEPRNLAWYLSKRIDGGADQIKKAKSARVSPMDRGKKLSSFCSAAAAGERSFSFVGTEEYVAPEVVRGDGHEFAVDWWALGVLVYEMSHGRTPFRGRGRKETFRNVLLREPEFTADARRRWPELTDLIARLLEKDPARRLGFAGGADEVRAHPFFAGVAWDLLGEVSRPPYIPAPADDTVSCEGFSVVEYFDRLHQPPLSPAEYSPEEELLPEF

SEQ ID NO: 3647 - protein, 432 aa, Sorghum bicolor
MEIDLHDVRAARVLGRGAMGTVFLAVDGAASSGEAYALKVFDKRSPAASRPAAGADAARRARWEVSVLSRLAHPHLPSLLGCAETPDLLAWALPYCPGGDLNELRHAQPDRVFSPAAIRFYVAEVVSALAELHATGIAYRDLKPENVLLRADGHVMLTDFDLSRQLPPRSPAASTSTSTSSSCSATSSPPPPQAQSHRRLKNIFKRSESAVTASTSGQEEEPRNLAWYLDRSIEGGVDQIKKAKSARVSPMERAKKLSSFLSAAAGERSFSFVGTEEYVAPEVVRGDGHEFAVDWWALGVLVYEMCHGRTPFRGRNRKETFRNVLLREPEFTADARRRWPELTDLIARLLEKDPSRRLGFAGGADEVRAHPFFAGVAWDLLGEVSRPPYIPAPADDIVSCDGFSVVEYFDKLHQPPLSPAEHSPEDDLLPEF

SEQ ID NO: 3648 - protein, 437 aa, Hordeum vulgare subsp. vulgare
MQPVSGTGVMDIDLPSARAARVLGRGAMGTVFLVAADAEYALKVFDRRSHAPGRAEDAARRARWEVSVLSRLAHPHLPSLLGRAETPDLLAWAMPYCAGGDLNELRRAQPDRVFSPAAVRFYAAELVSALADLHAAGIAYRDLKPENVLLRADGHVTLTDFDLSRLLPPKSPSASTCTSASSPCSSATPSPTAPKPKPHGRQYRHLRRIFARSESSVAASSGHEPQHNLAWYLNRSDGGVDKLKKARSARASASSGRGKNHASFRSAASGGVACERSFSFVGTEEYVAPEVVRGDGHEFSVDWWALGVLVYEMAFGRTPFRGRNRKETFRNVLLREPEFSADVGRRWPDLTDVISRLLDKDPARRLGFSGGADEVRAHPFFAGVAWDLLGEVSRPPYIPPPADDTVACEGFGVVDYLQKLHQPPPQADGSPESLPEF

SEQ ID NO: 3649 - protein, 456 aa, Zea mays
MSAPVGRLLLLVSAVAVGLALPVAAEIKKESFREDPRSSIMFEKFGFSRSGEVRIIISGASVSSPVARADLKQLGFFLVSDESLLDAIDEAREEGPTPEKLVAASDDDPDDGAAAGCVLDSPSPYVRKLFTFKNMKGGHYNRSFPVTRPDEYALFFANCAPGSLVSMTVRTEMYNVGADGSKDYLPVGQAPLPAIHGVFALCYAAFLAAWGYLTLSSVSAQQIHHLMSGLLAARLLYCVSAAEDQHHVRATGTPHGWDHVALYLFQLVKGVVLFALVGTGWCFLKPVLQGREKKVLVAVIPLQVAANVAAAVVGEAGPSLLLQGWATWWNRTLLLVDVACCCAVLFPVVWSHSHRETSSKTDGKAARNLSRLTLFQRFYAAVIGYLYFTRVVVYALRTAASYRYRWASVLAEETAALAFYLFMFHTFRPAEKSHYFCLHDDDDDDEMVLREEELEL

SEQ ID NO: 3650 - protein, 409 aa, Zea mays
  misc_feature (50)..(50): Xaa can be any naturally occurring amino acid
  misc_feature (59)..(59): Xaa can be any naturally occurring amino acid
MFEKFGFSRSGEVRITVSGASVSSPVARADLKQLGFFLLSDESLLHAIDXAREEGPTPXKLVAASDDDPDDAGCVLDSPSPYVRKLFTFKNMKGGHYNRSFPVTRPDEYALFFANCAPGSLVSMTVRTEMYNVGADGSKDYLPVGQAPLPAIHGVFALCYAAFLAAWGYLTLSSVSAQQIHHLMSGLLAARLLYCVSAAEDQHHVRATGTPHGWDHVALYLFQLVKGVVLFALVGTGWSFLKPVLQGREKKVLVAVIPLQVAANVVGEAGPSLLQGYWATWWNRTLLLVDVACCCAVLFPVVWSHSHRETSSKTDGKAARNLSRLTLFRRFYAAVIGYLYFARVVVYALRTAASYRYRWASVLAEETAALAFYLFMFHTCRPAEKSHYFCLHDDDDDDEMVLREEELEL

SEQ ID NO: 3651 - protein, 457 aa, Zea mays
MAAPARRLLLLVVTVAGALALPVAAQIKEESFKEDPRSSIMFEKFGFSESGAVRIIVSGASVSSPVARADPRQLGFFLLSDESLLHAIDEAQEGPTREKRAAATNGGGEDPDGGSTGCVLNSPYVKKLFTFKNMKGGHYNMSFPVTRPDEYTLFFANCAPEALVSMAVRTEMYNVNADGSKDYLPVGQAPLPAIYGFFAFCYAAFLAAWGYLTLSRARVSAHQIHHLMSGLLVARLLYCLSAAEDQHYIRVTGTPHGWDVAFYLFQLVKGVILFAVIALVGTGWSFLKPVLQDREKKVLMAVIPLQVTANIAAAVIGETGPFMQGWVTWNQILLFVDVVCCCAVLFPVVWSIRSLRETSKTDGKAARNLSKLTLFRQFYVVVIGYLYFTRIVVYALKAVASYKYRWVSILAEEMATLAFYLFMFYTFRPAEKSHYFSLDDDEEEAAEMVLREEEFEL

SEQ ID NO: 3652 - protein, 460 aa, Sorghum bicolor
MAAPAGRLLLLVFAVAGALAPPVAAEIRKESFREDPRSSIMFEKFGFSKSGRVRIIVSGAAVSSPVARPDNAELGFFLLSDESLLHAIDEAQEGPTREKRAAATNGGGEDPDGSSGAGAGCVLDSPYVKKLFTFKNMKGGHYNKSFPVTRPDEYTLFFANCAPEALVSMTVRTEMYNVNADGSKDYLPVGQAPLPAIYGFFAFCYAAFLAAWGYLTLSRDRVSAHQIHHLMSGLLVARLLFCLSAAEDQHYIRVTGTPHGWDVAFYLFQLVKGVILFAVIALVGTGWSFLKPVLQDREKKVLMAVIPLQVTANIAAAVIGETGPFMESWVTWNQILLFVDVACCCAVLFPVVWSIRSLRETSKTDGKAARNLSKLTLFRQFYVVVIGYLYFTRIVVYALKTVASYKYRWVSVLAEEMATLAFYLFMFYTFRPAEKSHYFSLDEDEEEAAEMVLREEEFEL

SEQ ID NO: 3653 - protein, 294 aa, Zea mays
MEDVANAHIYAHAHRSKRPQSAAIKDGDGDVDLSMKGARYRGVRRRPWGRFAAEIRDPMSKERRWLGTFDTAEQAACAYDIAARAMRGNKARTNFPGHATAGYWPWGAPQPAAVAHPINPFLLHNLIMSSSNHGCRLLNHAGHGHVHSAAPRPPAPAADATSTTIAAPFPVAAHPAVAMDEDVDDWDGVLRSEPADAGLLQDALHDFYPFTRPRAGGGRRGLSAAGTDARAAAALVAPVKPDAFVVPSPFAGVEGDGEYPMMPQGLLEDVIHSPAFVEVVAAPPSVPTRRGRRG

SEQ ID NO: 3654 - protein, 310 aa, Sorghum bicolor
MEDVANAHLYAHAHAHRSKRPPSSAAMKDGDGDVDLSMKGARYRGVRRRPWGRFAAEIRDPMSKERRWLGTFDTAEQAACAYDIAARAMRGNKARTNFPGHATAGYWPWGTPQPAAVAVAHPININPLLLHNLIMSSSHHGCRLLNQAGHGHGHGHGHSVPTRPPAPAPATDDTTIAGPFPVASHPDVVAMDEDVDDWDGVLRSEPADAGLLQDALHDFYPFTRPRAGGDGRRGLSAAGADDARAAAAALVPVMQEGFVFPSPFAGVDGNGEYPMMPQGLLEDVIPHSPAFLEVVAAPSVSVPTRRGRRG

SEQ ID NO: 3655 - protein, 386 aa, Sorghum bicolor
MGDVVRGLHGGGGAGVPAPAKSPERARLHVAMLALQFGYAGFHVVSRLALNMGVSKLVFPVYRNLIALCLLAPFAYFLEKKDRPAMTPAFLLQFFLLALCGITANQGFYLLGLDNTSPTFASAIQNSVPAITFAMAAALGIERVRLRRRDGLAKVAGTMLCVAGATVITLFKGPAVFGPATAAVVTTVTAAGTTGGNKSWALGCVYLMGHCLSWSGWLVLQAPVLKRYPARLSVTSYTCFFGLLQFLAVAAVVERDAAAWTLTSGSELLTILYAGLVASGVAFAVQTWCIDRGGPVFVAVYQPVQTLLVAVMASLLLGEQFYLGGVMGAVLIIAGLYLVLWGKSEERALAAKLAAAGVGDDEPDAAAASCLKQPLLPSPATLESAV

SEQ ID NO: 3656 - protein, 395 aa, Zea mays
MGDDVRGLRAAAVTTAAGVVPAKTPERARLHVAMLALQFGYAGFHVVSRLALNMGVSKLVFPVYRNLIALCLLAPFAYFLEKKDRPAMTPAFLLQFFLLALCGITANQGFYLLGLDNTSPTFASAIQNSVPAITFAMAAALGIERVRLRRRDGLAKAAGTVLCVAGATVITLFKGPAVFGPAPSVAAAVPVPMPAPGGGNNNNNNKSWALGCVYLMGHCLSWSGWLVLQAPVLKRYPARLSVTSYTCFFGLLQFLAVAAVFERDAAAWALGSGSELLTILYAGLVASGVAFAVQTWCIDRGGPVFVAVYQPVQTLLVAVMASLLLGEQFYLGGIMGAVFIIAGLYLVLWGKSQERALAAKQTAAAAAGSVCDDDAAASCLKQPLLPPPPATSEAV

SEQ ID NO: 3657 - protein, 401 aa, Sorghum bicolor
MADAGEGRRVCGMPEKAQLHVAMLALQFGYAGFHVVSRLALNMGISKLVFPVYRNIIALCLLVPFAYFLEKKDRPQLTLNFVIQFFLLALCGITANQGFYLLGLDNTSPTFASAIQNSVPAITFAMAAALRIEKVRLDRRDGVAKVAGTLACVAGASVITLYKGPTIFGPSGGGGGGDKLQLQQVAVAVAAGEKNWTLGCVYLIGHCLSWSGWLVLQAPVLKKYPARLSVTSYTCFFGVIQFLVIAAFMERDADAWKFHSGSELFTILYAGFIASGVAFAVQIWCIDRGGPVFVAVYQPVQTLVVAIMASLTLGEKFYLGGIIGAVLIIAGLYLVLWGKSEERARIARDAAAALVVSGAGDREGLLAAGGGGGGGIRSKAAASAAVTQPLLLPSSTSTDNV

SEQ ID NO: 3658 - protein, 387 aa, Oryza sativa Japonica Group
MAAEADARKVCGLPERVQLHGAMLALQFGYAGFHVVSRFALNMGISKLVFPVYRNIIALILLVPFAYFLEKKDRPQLTLSFVVQFFLLALCGITANQGFYLLGLDNTSPTFASAIQNSVPAITFAMAAALRIERVRLDRRDGVAKVLGTLACVAGASVITLYKGPTIFGPKLQLQAVAEVPFKAAIAGEGKNWTLGCVYLIGHCLSWSGWLVLQAPVLKKYPARLSVTSYTCFFGVIQFLIIAAFMERDADAWAFHSGSELFTILYAGFIASGVAFAVQIWCIDRGGPVFVAVYQPVQTLVVAIMASLTLGESFYLGGIIGAVFIIAGLYLVLWGKSHERARLAKDAAAIATDRDAAPCRIIAAGKQSSSVTQPLLLPTSSSSDNAV

SEQ ID NO: 3659 - protein, 387 aa, Oryza sativa Japonica Group
MAAEADARKVCGLPERVQLHGAMLALQFGYAGFHVVSRFALNMGISKLVFPVYRNIIALILLVPFAYFLEKKDRPQLTLSFVVQFFLLALCGITANQGFYLLGLDNTSPTFASAIQNSVPAITFAMAAALRIERVRLDRRDGVAKVLGTLACVAGASVITLYKGPTIFGPKLQLQAVAEVPLRAAIAGEGKNWTLGCVYLIGHCLSWSGWLVLQAPVLKKYPARLSVTSYTCFFGVIQFLIIAAFMERDADAWAFHSGSELFTILYAGFIASGVAFAVQIWCIDRGGPVFVAVYQPVQTLVVAIMASLTLGESFYLGGIIGAVFIIAGLYLVLWGKSHERARLAKDAAAIATDRDAAPCRIIAAGKQSSSVTQPLLLPTSSSSDNAV

SEQ ID NO: 3660 - protein, 386 aa, Oryza sativa Japonica Group
MGDAAAGGRKAAASGGGARLHVAMLALQLGYAGFHVVSRLALDMGVSKLVFPVYRNLIALFLLAPFAYFLEKKERPAMTASLAVQFFFLALCGITANQGFYLLGLENTSPTFASAIQNSVPAITFAMAAALRIERVRLSSRDGLAKVAGTLLCVAGASVITLFKGPAIFNTHHNHQPQPQQLAVAVAAGNKSWTLGCVFLLGHCVSWSGWLVLQAPVLKRYPARLSVTSYTCFFGLIQFLAIAAFLERDAAAWAVRSGSELFTILYAGFVASGVAFAVQTWCIHRGGPVFVAVYQPVQTLLVAVMASLLLGEQFHLGGIIGAVLIVAGLYLVLWGKSQERAIAAAKEASAAAAIADHQQQPASAAAADSCLKQPLLPASTVASENV

SEQ ID NO: 3661 - protein, 387 aa, Oryza sativa Indica Group
MAAEADARKVCGLPERVQLHGAMLALQFGYAGFHVVSRFALNMGISKLVFPVYRNIIALILLVPFAYFLEKKDRPQLTLSFVVQFFLLALCGITANQGFYLLGLDNTSPTFASAIQNSVPAITFAMAAALRIERVRLDRRDGVAKVLGTLACVAGASVITLYKGPTIFGPKLQLQAVAEVPLRAAIAGEGKNWTLGCVYLIGHCLSWSGWLVLQKPVLKKYPARLSVTSYTCFFGVIQFLIIAAFMERDADAWAFHSGSELFTILYAGFIASGVAFAVQIWCIDRGGPVFVAVYQPVQTLVVAIMASLTLGESFYLGGIIGAVFIIAGLYLVLWGKSHERARLAKDAAAIATDRDAAPCRIIAAGKQSSSVTQPLLLPTSSSSDNAV

SEQ ID NO: 3662 - protein, 507 aa, Sorghum bicolor
MDSPPLSPALLALSLLLLLALYIARRRRGGGRNRNYPPVAGTVFHQLLNFGRLMEYQTELAQRYRTFRMLTPTCNYVYTVEPANVEYMLKTNFANYGKGVMTHDVLEDLLGDGIFNVDGAKWRHQRKVASHEFSTRVLRDYSSGVFRDTAAELAGIVAMAAGAGERLDVADLLLRSTLDSMFKVGFGVNLGSLSGCSDEGAAAFARAFDDASEQVLYRFFDVSWKLKRLLNISSEAAMKGSIRTIDGFVYGVIDRKIEQMGRDQQEFAKKEDILSRFLMERESDPGCFDNKYLRDIILNFVIAGRDTTAGTLSWFLYMLCRNQHIQDKVAREVRAATTGDRDVGVQEFVAFLTEDAISRMQYLHAVLTETLRLYPAVPIDVKYCFSDDTLPDGYAVKKGDMVNYQPYQMGRMKFLWGADAEEFRPERWLGDDGVFVPESPFKFTAFQAGPRVCLGKEFAYRQMKIFAAVLLYLFRFEMWEANATVGFRPMLTLKMDGPLYVRATLRQ

SEQ ID NO: 3663 - protein, 656 aa, Zea mays
MGGFPEATGNLLDAAAQEFHPTVCAPYPLQPLPQQLYCPHPYPAMPVPPPPQIAMLQPVPPMAMAMAPQPGYTLPTTTPVVNGPSSRVVVLGLVPPHAQEADVAQAMAPFGAIRSVDACAVASEGVATVHFFDIRAAELALTCVREQHMRQQSRLGQLYAAAAVAPAWAPAPTPQAWDWPHPNDDGRGLVLGHAVWAHFATGADDGDNRGSLVVLSPLPGVSVADLRQVFQAFGDLKDVRESAQRPSHKFVDFFDTRDAARALAELNGQELFGRRLVVEFTRPSGPGPRRRGYAPHQHRPTAPTPPRLQATWRPSQPTSSQPPASSSSSGSVRAREGVVLLRRSSCKSSAGSDQSSKGGNAGTSHERKTKGGKIVVAAAAASSSTPTASGKQTQKGVGSSGGGSWKGRKSGWEARFLFKEPEAGGGADTQATPASEMDTRTTVMIRNIPNKYSQKLLLNMLDNHCIQSNEWIVASGEEQPFSAYDFVYLPIDFNNKCNVGYGFVNLTSPEARVRLYKAFHKQPWEVYNSRKICQVTYARVQGLEALKEHFKNSKFPCDSDEYLPVAFSPARDGKELTDPVPIVGRSPAASSASSPPKSRAASVDRLGQELMPAPSSSADGASSTTTSTHAPSEHDEEEEEGDIRLAGELRRLGYDD

SEQ ID NO: 3664 - protein, 666 aa, Sorghum bicolor
MEGGGGSGIGGFPGAPGNLLDAAAQEFHPTVCAPYPLQPLPHQLYCPHTYPAMPPPPQMAMLQPVPPMAMPMAPQPGYTLPTTAPVVDGPSSRVVVLCLVPPHAQERDVAQAMAPFGAIRSADACAVASEGVATVHFFDIRAAELAVACVREQHMRQQSRLGQLYAAAAVPPAWAPAPPTAPQAWDWPHPNDDGRGLVLGQVVWAHFAPGADDGENRGSLVVLSPLPGVSVADLRQVFQAFGDLKDVRESAHRPSHKFIDFFDTRDAARALAELNGQELFGRRLVIEFTRPSGPGPRRRGYAPHHRPTAPTPPRLQQATWRPAQTTSSQPPASSSSSSVSVRAREGVVLLRRPSDQAKGGNAGTRQERKSKGGKNVASSASAPASSSTPTASGKQAQKGAGSSGGGGAGGGGGNWKGRKSGWEARFLFKDPESAGDADTQSSPASERDTRTTVMIRNIPNKYSQKLLLNMLDNHCIQSNEWIAASGEAQPFSSYDFVYLPIDFNNKCNVGYGFVNLTSPEAAVRLYKAFHKQPWEVYNSRKICQVTYARVQGLDALKEHFKNSKFPCDSDEYLPVAFSPARDGKELTEPVPIVGRSPASGASSPPKSRAASVDLLGQELMPAPSSSADGASSTTTSTHALSEHADDDDNDEDIRLAGELRRLGYAD

SEQ ID NO: 3665 - protein, 693 aa, Sorghum bicolor
MHGRPRRPAKPEDEEAASAKAAKLRDLQAQVLHNHHARTYTKEAIGLSFKLLEINPEAYTAWNYRKLAFQHNVKELSDPEAIKSAVDDELRVVEVALRQNPKSYGAWYHRKWLLSQKLAPVDFKREFGLLDKLLKMDARNFHGWNYRRFLARFMGVPDEEELKYTMDKISDNFSNYSAWHNRSILLSNLLIQQSKGFESKQKIFSEEFELVTQALFTDPSDQSGWFYHLWLLAQTSSPDNPQLIASWPSNAAKGSAPLIKEKVEQHTLSSIWSRTVPIVLYFNDPVKGLNQSSVNLKSDLEFSDDIQWRPLTMADSGYSNCWATYLQITNECSGLQEYSVEVSIPCSDDIVSRSGSNYNCPVHFTFNIQLISNDAAQGLDMFHKPVAWNCSESFQSHGNRDPIPFDLLNITSALVEQDSNWHFERLSEEIDLFRELPDDNSKFGKLTLARLLLACAAVKSRGRSLIERKGYCEEALGLFTDLIHLDPSHKQYYEDERSLVLMDKLTCDMETFMKHCSVQLQPNSAPLNHVQLCRLSLTRIGFVERLLWVQMLDLSHNSLRSVEGLEALQHLVFLNISNNQISSFTALEPLTKIISLKVLDLSFNKIGAHSIDTTRYICSSPFSHKIEASEAFEEYQKVNINVEEYWDTILFFRSLKLAQLDIKGNEVASKENFRSLVVTLIPCLKWFDGEGVN

SEQ ID NO: 3666 - protein, 693 aa, Zea mays
MHGRPRRPAKPEDEEAASAKAAKLRDLQAQVLHNHHGRTYTKEAIGLSFKLLEINPEAYTAWNYRKLAFQHNVKELSDPEAIKSAVDDELRVVEVALRQNPKSYGAWYHRKWLLCQKLAPVDFKREFGLLDKLLKVDARNFHGWNYRRFLARFMGVSDEEELKYTMDKISDNFSNYSAWHNRSILLSNLLIQQSKGFESKQKIFSEEFELVTQALFTDPSDQSGWFYHLWLLAQTSCPDNPQLIASWPSNAAKLSSSLIKEKAEQHRQSSILSRTVPIVLYFNEPVKGLNQSSVNLKSDLEFSKDIIWRPLTMADSGYSNCWATDLQIINECSSLQEYSVEVSIPCSNGIVSRSGSNYNCPVHFTFGIELISNDPVQGLDMFDKPVAWNCSESFQPHGNRDPIPFDLLKITSALIEHDSNWHFERLSEEIDLFRELPDDNSKFGKLTLARLLLACSAIKSRGRSLIERKGYCEEALGLFTDLIHLDPSHKQYYEDERSLVLMDKLTCDMETFMKHCSVQVQPNSAPLNHVQLCRLSLTCIGFAERLLWVQMLDLSHNSLRSVEGLEALQHLVFLNISNNQISGFTALESLTKIISLKVLDLSFNKIGAHSIDTTRYICSSPFSHKMEASEAFEAYQKVNINVEEYWDAILFFRSLKLAQLDIKGNAVASKENFRTIVMMLIPCLKWFDGEDVN

SEQ ID NO: 3667 - protein, 702 aa, Hordeum vulgare subsp. vulgare
MHGQPRRPKQPEDDAAAAAKAAKLRELQVQVLHNHHTCTYTEEALGLSFKLLEINPEAYTAWNYRKLALQHNLKELSDPEAIKSSVDAELRVVELALRQNPKSYGAWYHRKWLLNQKLAPVDFKREYGLLDKLLKVDARNFHGWNYRRFLAKFMGVPEEKELQYTMDKIGENFSNYSAWHNRSILLSNLLIQRREGFESKQKIFSEEFELVIQALFTDPSDQSGWFYHLWLLAQTSTPDNPQLISSWPSHGAKLSLFSARKNEDQNMVSSPSSICCYSLKEGIIPIVLYFNDPVKGLNPSNVKLNSDFVFDKDVQWRPLAITDSGYSNCWATYLEIANKDCSTPQQFSVEVSIPCSNDIMSRSGSHCNCHVHFTFTIELGTNNDEAHDIDLFHDPISWSSSESFQSHGKPSCVAFDQLNITSALVQEESRWNLDRLSDEIDLFRDLPDENSKFAKLTLARLLLACAAIKSRGSSLIERKGYCEEALGFFSDLINLDPSHKRYYEDERSLVLMDQLTCDMEAFMKYCSVQVRSNSAPLNHVQLCRLSLTRIGFTERMLWVQMLDLSHNKLRSIEGLEALQQLVCLNISNNQLSSFTSLEPLTKISLKALDLSFNEIGAHPIDTTRYICSSPFSHKVERCEAFEECRKKNVNVEEFWDAILFFKSVNLVQLDIKGNAVADKDSFATVVTTLSPSLKWLDGACIH

SEQ ID NO: 3668 - protein, 702 aa, Hordeum vulgare subsp. vulgare
MHGQPRRPKQPEDDAAAAAKAAKLRELQVQVLHNHHTCTYTEEALGLSFKLLEINPEAYTAWNYRKLALQHNLKELSDPEAIKSSVDAELRVVELALRQNPKSYGAWYHRKWLLNQKLAPVDFKREYGLLDKLLKVDARNFHGWNYRRFLAKFMGVPEEKELQYTMDKIGENFSNYSAWHNRSILLSNLLIQRREGFESKQKIFSEEFELVIQALFTDPSDQSGWFYHLWLLAQTSTPDNPQLISSWPYHGAKLSLFSARKNEDQNMVSSPSSICCYSLKEGIIPIVLYFNDPVKGLNPSNVKLNSDFVFDKDVQWRPLAITDSGYSNCWATYLEIANKDCSTPQQFSVEVSIPCSNDIMSRSGSHCNCHVHFTFTIELGTNNDEAHDIDLFHDPISWSSSESFQSHGKPSCVAFDQLNITSALVQEESRWNLDRLSDEIDLFRDLPDENSKFAKLTLARLLLACAAIKSRGSSLIERKGYCEEALGFFSDLINLDPSHKRYYEDERSLVLMDQLTCDMEAFMKYCSVQVRSNSAPLNHVQLCRLSLTRIGFTERMLWVQMLDLSHNKLRSIEGLEALQQLVCLNISNNQLSSFTSLEPLTKISLKALDLSFNEIGAHPIDTTRYICSSPFSHKVERCEAFEECRKKNVNVEEFWDAILFFKSVNLVQLDIKGNAVADKDSFATVVTTLSPSLKWLDGACIH

SEQ ID NO: 3669 - protein, 691 aa, Oryza sativa Indica Group
MHGRPRRPDKPEDAAAAEAKAAKLRDLQAQVLHNHHSRTYTKEALGLSFKLLEINPEAYTAWNYRKLAFQHNIGELSEPEAIKSAIDDELRVVEVALRQNPKSYGAWYHRKWLLNQKLAPVDFKREFGLLDKLLKVDARNFHGWNYRRFLARFMGVPEEEELKYTIDKISDNFSNYSAWHNRSILLSNLLIKQSKGFESKQKIFSEEFELVTQALFTDPSDQSGWFYHLWLLAQTSSPENPQLIASWPSNGSNLSLSSLSSICCYSLKEGILPIVLYFNEPVKGLSSSSVSLNSDLVVSKNIQWRPLSVTDSGHSNCWVTYLEVSNLECNSLQQFSVEVSITNSDEIVSRSGSNYNCPVHFSFTFELSNNDSTAKDIDPIHELISWDFSEPLLSHVNPSCICFEQLKITTSLVHKESNWHLERLSDEIDLFRELHDDNSKFAKLTLARLLLACAAIKSRGSSLVERKGYCEESLGLFNDLIDLDPSHKRYYEDERSLVLMDQLTCDMEAFKKYCSVKALPKLAPLNHVQLCRLSLTRIGFAERLLWVQMLDLSHNNLRSIEGLEALQQLVCLNLGNNQISSFTALEPLTKIISLKVLDLSCNEIGTHPIDTTRYICPSPFSHRVEACEAFEECRKKNINVEEFWDAILFFKHVNLVQLCLEGNAVTNKENLRTLVVTLNPSLKWFDGKFVH

SEQ ID NO: 3670 - protein, 691 aa, Oryza sativa Japonica Group
MHGRPRRPDKPEDAAAAEAKAAKLRVLQAQVLHNHHSRTYTKEALGLSFKLLEINPEAYTAWNYRKLAFQHNIGELSEPEAIKSAIDDELRVVEVALRQNPKSYGAWYHRKWLLNQKLAPVDFKCEFGLLDKLLKVDARNFHGWNYRRFLARFMGVPEEEELKYTMDKISDNFSNYSAWHNRSILLSNLLIKQSKGFESKQKIFSEEFELVTQALFTDPSDQSGWFYHLWLLAQTSSPENPQLIASWPSNGSNLSLSSLSSICCYSLKEGILPIVLYFNEPVKGLSSSSVSLNSDLVVSKNIQWRPLSVTDSGHSNCWVTYLEVSNLECNSLQQFSVEVSITNSDEIVSRSGSNYNCPVHFSFTFELSNNDSTAKDIDPIHELISWDFSEPLLSHVNPSCICFEQLKITNSLVHKESNWHLERLSDEIDLFRELHDDNSKFAKLTLARLLLACAAIKSRGSSLVERKGYCEESLGLFNDLIDLDPSHKRYYEDERSLVLMDQLTCDMEAFKKYCSVKALPKLAPLNHVQLCRLSLTRIGFAERLLWVQMLDLSHNNLRSIEGLEALQQLVCLNLGNNQISSFTALEPLTKIISLKVLDLSCNEIGTHPIDTTRYICPSPFSHRVEACEAFEECRKKNINVEEFWDAILFFKHVNLVQLCLEGNAVTNKENLRTLVVTLNPSLKWLDGKFVH

SEQ ID NO: 3671 - protein, 683 aa, Sorghum bicolor
MVDFRHARSLLAAGVLLAGVVVAVLGAGEDDEHFVYSGFTGAPLALDGTATITASGLLELTNGTAQLKGHAVHPAPLRFQRTPGGPVRSFSASFVFGIIPPYSDLSGHGIVFFVGKDSFANALPSQYLGFLNTNNNGNASNRVFGVELDTIRSTEFKDPDDNHVGIDINSLTSVNATNAGYYDDGTGEFHNLTLISAKPMQVWVDYDGETARINVFLTPLGTSKPSRPLVSATWNLSDVLVEPAYVGFSSATGTVKSEHYVLGWSFAMDGPAPDINVASLPKLPRFGPEPRSKVLEIVLPIATAAFVLAVVAVVVALVRRRLKYAELREDWEVEFGPHRFTYKDLFRATEGFKSKMLLGVGGFGRVYRGVLPKSKLEVAVKKVSHESRQGIKEFVAEVVSIGRLRHRNLVQLLGYCRRKGELLLVYDYMPNGSLDKYLYGKGDDDKAMATLDWVQRFRIIKGVASGLLYIHEDWEQVVIHRDIKASNVLLDSEMNGRLGDFGLARLYDHGADPQTTHVVGTMGYLAPELARSGKASPLTDVFAFGAFILEVVCGRRPVEQSMTDSRLMLVDWVLEHWQKGSLAEVIDAKLQGCYDDEEAMLALKLGLLCSHPLPAARPSMRQVMQYLDGDMPFPELTPSHLSFSMLALMRSEGFDSFVLSASTNPSSSTAMSIGTMTGLSGGR

SEQ ID NO: 3672 - protein, 678 aa, Zea mays
MVDLRSLLAAGVVLLAGLAVLVHGAGDEQFVYSGFTGAPLALDGTAAITPSGLLELTNGTAQLKGHAVHPAPMRFQRTPGGPVRSFSASFVFSIIPPYSDLSGHGIVFFVGRDSFATALPSQYLGFLNSSNNGNFTNHVFGVELDTIRSTEFNDPNDNHVGIDVNSLTSANASTAGYYDDGTGAFHDLTLISAKPMHVWVDYDGETAQVNVFLAPLRTPKPTRPLVSAAQNLSGVVVDPAYVGFSSATGTVRSEHYVLGWSFAMDGPAPDIDIASLPKLPRFGPNPRSKVLEVVLPIATAASVLGVVAVVVALVRRRLKYAELREDWEVEFGPHRFTYKDLFRATEGFKTKMLLGAGGFGRVYRGVLPKSKREVAVKKVSHESRQGIKEFVAEVVSIGRLRHRNIVQLLGYCRRKGELLLVYDYMPNGSLDKYLYGKDDKATATLDWAQRFRIIKGVASGLLYIHEDWEQVVIHRDIKASNVLLDSDMNGRLGDFGLARLYDHGADPQTTHVVGTMGYLAPELARSGKASPLTDVFAFGAFILEVVCGRRPVEQSMTDSRLMLVDWVLEHWQNATLADVIDAKLKGSCDDEEAMLALKLGLLCSHPLPAARPSMRQVMQYLDGDMPFPELTPSHLSFSMLALMRSEGFDSFILSASTTQPLSSTAMSIGTMTGLSDGR

SEQ ID NO: 3673 - protein, 684 aa, Hordeum vulgare subsp. vulgare
MAGMESPWRPLLAALLLVCFGAAVLGDGDGEQFVYPGFAGANATLALDGTAVVQPSGLLELTNGTAQLTGHAVHRTPLRLRRSPGDGVRSFSASFVFGIIPPYSDLSGHGIVFFVGKDNFSAALPSQHLGLLNSFNNGNATNHIFGVELDTILNKEFNDPNDNHVGIDVNSLESVAARPAAYYDEKSGAFHDLLLISGKAMQVWVDYESESTQINVFLAPLKNGAKPSTPLVSAKRNLSEVLVEPAYAGFSSSTGTVRSRHYLLGWSFAMDGPAPPIDIGSLPKLPFVGVRPRSRVLEIVLPIATAAFVLGVVGVVILLVRRRSRYAEVREDWEVEFGPHRFSYKDLFRATEGFKGKTLLGFGGFGRVYKGVLPKSKLEVAVKKVSHESRQGIKEFVAEVVTIGRLRHRNLVQLLGYCRRKGELLLVYDYMSNGSLDKYLYGGSKDKEKPALDWAQRFGIIKGVASGLLYIHEDFEQVIIHRDIKASNVLLDADMNGRLGDFGLARLYDHGADPQTTHVVGTMGYLAPELARTGKASPLTDVFAFGAFILEVACGRRPVEQAMNDSRLMLVDWVLEHWQKETLLEVVDARLDGNYDAGEVVLALKLGLMCSHPMPGARPSMRQVMQYLEGDLPIPELTPTQMSFSMLALMQSQGFDSFVLSAASDPSSATMMTMGTITGLSGGR

SEQ ID NO: 3674 - protein, 677 aa, Oryza sativa Indica Group
MAEKKGVGSLLPGLAVVLVGFVVGGAGSDDRFVYAGFTGAPLALDGTAAITASGLLELTNGTAQLKAHAVHPAALRFHGGGGGASAVRSFSTSFVFGIIPPYSDLSGHGIVFFVGKNNFSAALPSQYLGLLNSTNNGNTTNHIFGVELDTIVSSEFQDPNDNHVGIDINSLKSVAVNTAGYYDDKTGAFHDLSLISGKAMQVWVDYDGATTQISVFMAPLKMSKPTRPLVSAVYNLSQVLVDPVYVGFSSATGTVRSRHYVLGWSFAMDGPAPAIDIAMLPKLPFYGTKARSKVLDIVLPIATAVFVLGVVVVVVLLVRRRLKYAELREDWEVEFGPHRFTYKDLFRATEGFKAKMLLGIGGFGRVYKGVLPKSNMEVAVKKVSHESRQGIKEFIAEVVSIGRLRHRNLVQLLGYCRRKGELILVYDYMPNGSLDKYLYDDKNKPTLDWTQRFRIIKGVASGLLYIHEDWEQVVIHRDIKASNVLLDSEMNGRLGDFGLARLYDHGADPQTTHVVGTMGYLAPELARSGKASPLTDVFAFGAFLLEVTCGRRPVEQAMQDNQVMLVDWVLEHWQKGSLTKVIDARLHGNYNIDEAILVLKLGLLCSHPLPGARPSMRQVVQYLEGDMPFPELTPTHLSFSMLALMQNEGFDSFVMSTSLPSETMMTIGTMSGLSGGR

SEQ ID NO: 3675 - protein, 641 aa, Oryza sativa Japonica Group
MAEKKGVGSLLPGLAVVLVGFVVGGAGSDDRFVYAGFTGAPLALDGTAAITASGLLELTNGTAQLKAHAVHPAALRFHGGGGGGGAVRSFSTSFVFGIIPPYSDLSGHGIVFFVGKNNFTAALPSQYLGLLNSTNNGNTTNHIFGVELDTIVSSEFQDPNDNHVGIDINSLKSVAVNTAGYYDDKTGAFHDLSLISGKAMQVWVDYDGATTQISVFMAPLKMSKPTRPLVSAVYNLSQVLVDPVYVGFSSATGTVRSRHYVLGWSFAMDGPAPAIDIAMLPKLPFYGTKARSKVLDIVLPIATAVFVLGVVVVVVLLVRRRLKYAELREDWEVEFGPHRFTYKDLFRATEGFKAKMLLGIGGFGRVYKGVLPKSNMEVAIKKVSHESRQGIKEFIAEVVSIGRLRHRNLVQLLGYCRRKGELILVYDYMPNGSLDKYLYDDKNKPTLDWTQSEMNGRLGDFGLARLYDHGADPQTTHVVGTMGYLAPELARSGKASPLTDVFAFGAFLLEVTCGRRPVEQAMQDNQLMLVDWVLEHWQKGSLTKVIDARLHGNYNIDEAILVLKLGLLCSHPLPGARPSMRQVVQYLEGDMPFPELTPTHLSFSMLALMQNEGFDSFVMSTSLPSETMMTIGTMSGLSGGR

SEQ ID NO: 3676 - protein, 641 aa, Oryza sativa Japonica Group
MAEKKGVGSLLPGLAVVLVGFVVGGAGSDDRFVYAGFTGAPLALDGTAAITASGLLELTNGTAQLKAHAVHPAALRFHGGGGGGCAVRSFSTSFVFGIIPPYSDLSGHGIVFFVGKNNFTAALPSQYLGLLNSTNNGNTTNHIFGVELDTIVSSEFQDPNDNHVGIDINSLKSVAVNTAGYYDDKTGAFHDLSLISGKAMQVWVDYDGATTQISVFMAPLKMSKPTRPLVSAVYNLSQVLVDPVYVGFSSATGTVRSRHYVLGWSFAMDGPAPAIDIAMLPKLPFYGTKARSKVLDIVLPIATAVFVLGVVVVVVLLVRRRLKYAELREDWEVEFGPHRFTYKDLFRATEGFKAKMLLGIGGFGRVYKGVLPKSNMEVAIKKVSHESRQGIKEFIAEVVSIGRLRHRNLVQLLGYCRRKGELILVYDYMPNGSLDKYLYDDKNKPTLDWTQSEMNGRLGDFGLARLYDHGADPQTTHVVGTMGYLAPELARSGKASPLTDVFAFGAFLLEVTCGRRPVEQAMQDNQLMLVDWVLEHWQKGSLTKVIDARLHGNYNIDEAILVLKLGLLCSHPLPGARPSMRQVVQYLEGDMPFPELTPTHLSFSMLALMQNEGFDSFVMSTSLPSETMMTIGTMSGLSGGR

SEQ ID NO: 3677 - protein, 391 aa, Zea mays
  misc_feature (195)..(195): Xaa can be any naturally occurring amino acid
MASPAAVKKVLVPIAAGSEPAEAFVPIAVLRRAGADVTVAAAGAGTGLRVHAMYGVTVVADASVADCADASYDLVVLPGGVPGADNLGGCAALESIVRRHALGGGLCAAICAALPLALARWGLLDGVKATAHPEFVDKFPAEVAAVDANVVVDGRVVTGRGPAAAMEFALALVDQLYGKGKVDEIAKPMMVRYEXGYAFEELNPVQWRCSGTPRVLIPVANGSEEMEVLVTADVLRRAKADVVVASAEEVVVARHGTRIVADALLQDAAGQQFDLIVVPGGMPGVKTTLADKVELMALLKEHAAAGRAYGAIGAATAQVLEPHGLIGGSMKATTCASRADRPSECGSRVVVDGNLATSGSTGTAMEFALAVVEKLLGPEAAREVAEALLFV

SEQ ID NO: 3678 - protein, 339 aa, Zea mays
MYGVTVVADASVADCADASYDLVVLPGGVPGADNLGGCAALEGIVRRHALGGGLCAAICAAPPLALARWGLLDGVKATAHPEFVDKFPAEVAGVDANVVVDGRVVTGRGPAAAMEFALALVDQLYGKGKVDEIAKPMMVRYEPGYAFEELNPVQWRCSGTPRVLIPVANGSEEMEVLVTVDVLRRAKADVVVASAEEVVVARHGTRIVADALLQDAAGQQFDLIVVPGGMPGVKTTLADKVELMALLKEHAAAGRAYGAIGAATAQVLEPHGLIGGSMKATTCASRADRPSECGSRVVVDGNLATSGSTGTAMEFALAVVEKLLGPEAAREVAEALLFV

SEQ ID NO: 3679 - protein, 400 aa, Sorghum bicolor
MASLAAVKKVLVLVPITAGSEPVEAFVPIAVLRRAGADVTVAAAGAGAGLRVHAMYGVTVVADANVADCADASYDLVALPGGVPGADNLGGCAALESIVRRQALGGGLYAAICAAPPLALARWGLLDGVKATAHPAFVDKFPAEVAAVDANVVVDGRVVTGRGPAPAMEFALALVEQLYGKDKVDEIAKPMMVRYEPGYAFKELNPVQWQCSGTPKVLIPVANGSDEMEVLVTVDVLRRANADVVVASAEGGDAEVVVVARHGTRIVADALLVDAVAAGQQFDFVVVPGGMAGAKTLAGTEALVALLKEHAAAGRAYGAIGAATAEVLEPHGLLELEGKKATTTCASMADSRECGSRVVVDGNLATSSGPGTAMEFALAVVEKLLGAEAAREVAEALLFV

SEQ ID NO: 3680 - protein, 429 aa, Sorghum bicolor
MAAASSVVRRAAAAASASRGLLLARAFASGVGGGEKAKRVLVPVAAGTEPIEAAATADVLNRAGARVTVATADPPGDDGLVVQAAYGVKFVADGRVADLQGESFDLIALPGGMPGSVGLRDCKALEKMVKTHAENGGLYGAICAAPAVTLAYWGMLKGLKATCYPSFMEKFTAEVIPVDSRVVVDRNAVTSQGPGTAIEFGLALVEKLYGKEKMEEVAGPLYVRPQHGAEYTVEELNSAEWKCSSTPQVLVPVANGSEEIEAVNLIDVLRRAGANVIVASVEEKLQTVTRRHKFNLIADMMLDEATEMQFDLIVMPGGLQGAQKFASTKKLVDLLKKQAESNKPYGAICASPAHVLQPHGLLKGKKATAFPPMSHLLTDQSACEHRVVVDGNLITSRAPGTATEFALAIVEKLFGRDKAVSIAKEMIFM

SEQ ID NO: 3681 - protein, 485 aa, Zea mays; identical to SEQ ID NO: 1059

SEQ ID NO: 3682 - protein, 485 aa, Zea mays
MRKVCANPDREVGLDTVLEVPVPDQLHHDPSSSSSGHGRRRRRTLKAWVRSRMDQRHRRHSSPPSQADVQLMLGVVGAPLVPQPVQARKAMVAGEDIKEEPLEVSKAKYIVEQYVAASGGERALSAATSMYAVGKVLMRTRSSSSTTKQGQRACRTGMVGVVHGGAEIAGGLVLWQKGPEVWCVEMVVAGGTKMSAGSDGRVAWRQTPWQQAHASRGPPRPLRRCVQGLNPRSTANLFSTATWVGEKSVDGDDCFVLRVDADPLALRARSGGDVEVVRHAVWGYFSQRTGLLSRLEDSHLLRVRATKGSPPAETTTYWETSMDSSIGDYRAVDGINVAHAGRTVVSLSRFGGSTNDDGAGSESAGVLGRRTCTCMEENWSIEEVDFNVVGLSAECFLPPRDMVVVPCSPKPVVDEKGQCGRLDHSCKKDDAPAALDVRNKNGNGGAGGVHRPATARKALVTAATGLPWSGTAKVVAVETFDTTAE

SEQ ID NO: 3683 - protein, 475 aa, Sorghum bicolor
MRKVCANLDREDGLDTVLEVPVPELYKEPSSSGHGRRRRRTVKAWVWSRMDQHHRRYGALPSQADVQLMLGVIGAPLVPQPIEARKAMAGEDIKEEPLEVSKAKYIVEQYVAASGGEPALSAATSMYAVGKVLMRATKGQKAKTGMGVVHGGGDIAGGFVVWQKRPEMWCVEMVVAGGTKMSAGSDGKVAWRQTPWQQAHASRGPPRPLRRCVQGLDPKSTANLFSTATWVGEKTIDGDDCFVLRVDADPLALRARSSADVEVVRHAVWGYFSQRTGLLDRLEDSHLLRIRMQGASSAQTAYWETSMESSIGDYRAVNGINIAHAGRTVVSLSRFGSSANDQDDGSDTDVLGSKRTCTCMEETWSIEEVDFNIMGLSTECFLPPRDLVPCSSKPVEKEHCAGLDHSCKKEDAVGTVPATSAVVGSCDPAAVDVKYKNSDGGVRPLATARKALVPAGTGLSWFGTAKVVAVDTAAE

SEQ ID NO: 3684 - protein, 436 aa, Sorghum bicolor; identical to SEQ ID NO: 1060

SEQ ID NO: 3685 - protein, 435 aa, Zea mays
MDPCPFVRVLVGNLALRMPVAPPAAGAGAGVHPSTSPCYCKIRLGKMPVQSVPAPLVVSDGGEQTPASGALAAAFHLSKADLEWFNGKPSLFSSRGEASLKVSVYAGRKGSACGVSSGRLLGKATIALDLKGAEAKPAVLHSGWISIGKRSGKGSTAATELSLTVRAEPDPRFVFEFDGEPECSPQVLQVRGSMKQPMFTCKFGCRSNSDLRRPGMQPERDAASAKERKGWSVTVHDLKGSAVAMASMVTPFVPSPGTDRVSRSNPGAWLILRPAGDGSWEPWARLECWRERGGAGASDSLGYHFALLVPGADHAVALADSSIPSSNGGKFAIDLTAAQPLSRGGTPGCSPRGSGDLSNWPLGNYRGFVMSAAVQGEGRCSKPTVEVGVAHIGCAEDAAAFVALAAAVDLSMDACRLFSHRLRKELSHLQADLLR

SEQ ID NO: 3686 - protein, 435 aa, Zea mays
  misc_feature (89)..(89): Xaa can be any naturally occurring amino acid
MDPCPFVRVLVGNLALRMPVAPPAAGAGAGVHPSTSPCYCKIRLGKMPVQSVPAPLVVSDGGEQTPASGALAAAFHLSKADLEWFNGKXSLFSSRGEASLKVSVYAGRKGSACGVSSGRLLGKATIALDLKGAEAKPAVLHSGWISIGKRSGKGSTAATELSLTVRAEPDPRFVFEFDGEPECSPQVLQVRGSMKQPMFTCKFGCRSNSDLRRPGMQPERDAASAKERKGWSVTVHDLKGSAVAMASMVTPFVPSPGTDRVSRSNPGAWLILRPAGDGAWEPWARLECWRERGGAGASDSLGYHFALLIPGADHAVALADSSIPSSNGGKFAIDLTAAQPLSRGGTPGCSPRGSGDLSNWPLGNYRGFVMSAAVQGEGRCSKPTVEVGVAHIGCAEDAAAFVALAAAVDLSMDACRLFSHRLRKELSHLQADLLR

SEQ ID NO: 3687 - protein, 437 aa, Zea mays
MDPCPFVRVLVGNLALRMPVAPPASGAGAGVHPSTSACYCKIRLGKMPVQSVPAPLVVTDGGEQTPASGALAAAFHLSKADLEWFDGKPSLFSSRRGAGDASLKVSVYAGRKGSACGVSSGRLLGKATVPLDLKGAEAKPAVLHSGWISIGKRAGKGSPAAAAELCLTVRAEPDPRFVFEFDGEPECSPQVLQVRGSMRQPMFTCKFGCRSNSDLRRPGMRRERDAKERKGWSVTVHDLKGSPVAMASMVTPFVPSPGTDRVSRSNPGAWLILRPAADGAWEPWARLECWRDRRGAGASDSLGYRFDLLVPGVDHAAVALADSSIPSSKGGKFAIDLTAAQPLSRGGTPGCSPRGSGDLSKWPLGNYRGFVMSAAVQGEGRCSKPTVEVGVAHVGCAEDAAAFVALAAAVDLSMDACRLFSHRLRKELSHPQADLLR

SEQ ID NO: 3688 - protein, 444 aa, Oryza sativa Indica Group
MDPCPFVRVLVGNLALRMPVAPPAAGAGAGVHPSTAPCYCKIRLGRMPWQVAAAPLVVADGGEQAPSGALAAAFHLSKADLEWFARKPSLLFSSSSSSRGPATLKVAVYAGRKGTTCGVSSGRLIGKATIPVDLKGAEAKAAVVHSGWICVGKKSGGKGGSAAAELSLTVRAEPDPRFVFEFDGEPECSPQVLQVRGSMKQPMFTCKFGCRSNSDLRRSVVQTERDAAAAAGKERKGWSVTVHDLSGSPVALASMVTPFVASPGTDRVSRSNPGAWLILRPAGDGSWEPWGRLECWRERGGAGASDSLGYRFDLLLPGVDHAVPLAESSIAASKGGKFAIDLTSMQPQSRGGTPGCSPRGSGDFSQWPLSSYSYRGFVMSSSVQGEGRCSKPTVEVGVPHVGCAEDAAAFVALAAAVDLSMDACRLFSHKLRKELSHLRSDVLR

SEQ ID NO: 3689 - protein, 444 aa, Oryza sativa Japonica Group
MDPCPFVRVLVGNLALRMPVAPPAAGAGAGVHPSTAPCYCKIRLGRMPWQVAAAPLVVADGGEQAPSGALAAAFHLSKADLEWFARKPSLLFSSSSSSRGPATLKVAVYAGRKGTTCGVSSGRLIGKATIPVDLKGAEAKAAVVHSGWICVGKKSGGKGGSAAAELSLTVRAEPDPRFVFEFDGEPECSPQVLQVRGSMKQPMFTCKFGCRSNSDLRRSVVQTERDAAAAAGKERKGWSVTVHDLSGSPVALASMVTPFVASPGTDRVSRSNPGAWLILRPAGDGSWEPWGRLECWRERGGAGASDSLGYRFDLLLPGVDHAVPLAESSIAASKGGKFAIDLTSMQPQSRGGTPGCSPRGSGDFSQWPLASYSYRGFVMSSSVQGEGRCSKPTVEVGVPHVGCAEDAAAFVALAAAVDLSMDACRLFSHKLRKELSHLRSDVLR

SEQ ID NO: 3690 - protein, 444 aa, Oryza sativa Japonica Group
MDPCPFVRVLVGNLALRMPVAPPAAGAGAGVHPSTAPCYCKIRLGRMPWQVAAAPLVVADGGEQAPSGALAAAFHLSKADLEWFARKPSLLFSSSSSSRGPATLKVAVYAGRKGTTCGVSSGRLIGKATIPVDLKGAEAKAAVVHSGWICVGKKSGGKGGSAAAELSLTVRAEPDPRFVFEFDGEPECSPQVLQVRGSMKQPMFTCKFGCRSNSDLRRSVVQTERDAAAAAGKERKGWSVTVHDLSGSPVALASMVTPFVASPGTDRVSRSNPGAWLILRPAGDGSWEPWGRLECWRERGGAGASNSLGYRFDLLLPGVDHAVPLAESSIAASKGGKFAIDLTSMQPQSRGGTPGCSPRGSGDFSQWPLASYSYRGFVMSSSVQGEGRCSKPTVEVGVPHVGCAEDAAAFVALAAAVDLSMDACRLFSHKLRKELSHLRSDVLR

SEQ ID NO: 3691 - protein, 404 aa, Oryza sativa Japonica Group
MDPCPFVRVLVGNLPLVVADGGEQAPSGALAAAFHLSKADLEWFARKPSLLFSSSSSSRGPATLKVAVYAGRKGTTCGVSSGRLIGKATIPVDLKGAEAKAAVVHSGWICVGKKSGGKGGSAAAELSLTVRAEPDPRFVFEFDGEPECSPQVLQVRGSMKQPMFTCKFGCRSNSDLRRSVVQTERDAAAAAGKERKGWSVTVHDLSGSPVALASMVTPFVASPGTDRVSRSNPGAWLILRPAGDGSWEPWGRLECWRERGGAGASNSLGYRFDLLLPGVDHAVPLAESSIAASKGGKFAIDLTSMQPQSRGGTPGCSPRGSGDFSQWPLASYSYRGFVMSSSVQGEGRCSKPTVEVGVPHVGCAEDAAAFVALAAAVDLSMDACRLFSHKLRKELSHLRSDVLR

SEQ ID NO: 3692 - protein, 457 aa, Hordeum vulgare subsp. vulgare
MDPCPFVRVLVGNLALKMPVAPRPAGAGAGVHPTTSPCYCTIRLNKLPLQSAAAPLLPSDDMTQGPAATGALAAAFHLSKADLDRVTAKPSLFVARSARLKVAVYAGRRGTTCGVNSGRLLGKVVIPLDLKTAVGKPIVFHSGWVPINKRGRKASAVSGSAQLNLTVRAEPDPRFVFQFDGEPECSPQVLQVQGGMMQPMFTCKFSCRSNSDLRSRSMHSDPGSGGRNWLMSFGSDRERAGKERKGWSVTVHDLSGSPVALASMVTPFVASPGSDRVSRSNPGAWLVLRPGDGTWKPWGRLECWRERGAGAAGDSLGYRFELLIPDPTGMGVGVSVAESNVPTSRGGRFVIDLTAAQPFGRSGSPGCSPRGSGDFSGGYGLWPFGSYRGFVMSAAVQGEGRCSRPTVEVGVPHVGCAEDAAAFVALAAAVDLSMDACRLFSHRLRRELSSTRSDPLR

SEQ ID NO: 3693 - protein, 462 aa, Oryza sativa Japonica Group
MDPCPFVRVLVGNLSLKMPVAPRPAGAGAGVHPSTSPCYCKIRLNKLPYQTADAPLLLPPSPEASAAPAPAPATGALAAAFHLSKADLDRLTAKPSLFGSRTARLKIVVYAGRRGTTCGVGGGSGRLLGKVVIPLDLKGASAKPVVYHSSWICIGKRGRKPSSVSAANAQLNITVRAEPDPRFVFEFDGEPECSPQVLQVQGSMKQPMFTCKFSCRSNSDLRSRSMPADMGSGGRNWLTAFGSDRERAGKERKGWSVTVHDLSGSPVALASMVTPFVASPGTDRVSKSNPGAWLVLRPGDGTWKPWGRLECWRERGAGAAAGDSLGYRFELVLPDPTGMGVGVSVAESTIPASKGGRFAIDLTATQQFGRSGSPACSPCGSGDYGMWPFGSCRGFVMSAAVQGEGKCSRPAVEVGVQNVGCAEDAAAFVALAAAVDLSMDACRLFSHRLRRELSASRSDLLR

SEQ ID NO: 3694 - protein, 760 aa, Sorghum bicolor
MEMNKTRWCRATLLLLLSLALRGAAYLQERKNYIVHLRPREGADGGSVEEWHRSFLPQAAARLDSTADGGGDDGPRIIYSYTDVFTGFAARLTDEEAEALRATDGCARLYPEVFLPLATTRSPGFLGLHLGNEGFWSGSGFGRGVVIGILDTGILPSHPSFGDDGLQPPPKGWKGTCEFKNIAGGGCNNKIIGARAFGSAAVNSTAPPVDDAGHGTHTASTAAGNFVENANVRGNADGTASGMAPHAHLSIYKVCTRSRCSIMDIIAGLDAAVKDGVDVLSFSIGAYSGTQFNYDPIAIAAFKAMERGIFVSCAAGNAGPDPGTVGNGAPWMLTVAAGTMDRAIRTNVKLGNGEEFHGESLFQPRNNSAADPLPLVYPGADGFDASRDCSVLRGAEVTGKVVLCESRGLSGRIEAGQTVAAYGGVGMIVMNKAAEGYTTFADAHVLPASHVSYEAGAKIMAYLNSTANGTASIDFKGTIIGSYPSPAVTFFSSRGPSKASPGILKPDITGPGMNILAAWAPSDSHTEFSDGGADLSFFVESGTSMSTPHLSGIAALLKSLHPDWTPAAIKSAIMTTSDAVDRTGLPIKDEQYRHATFYAMGAGYVNPALAFDPGLVYDLHADDYIPYLCGLGLGDDGVTEIAHRPITCGGVKAITEAELNYPSLVVNLLSQPITVNRTVTNVGKASSVYTAVVDMPKDVSVTVQPPMLRFTELKEKQSFTVTVRWAGQPNVAGAEGNLKWVSDDYIVRSPLVIPPKGEQQ

SEQ ID NO: 3695 - protein, 753 aa, Zea mays
MGMNKSRWCRATLLLLLSLALRGAAFLQERKNYIVHLRPREATDGSVDGWHRSFLQQAAAGLDSTADEGPQIIYSYSDVFTGFAARLTDEEAEALRATDGCVRLYPEVFLPLATTRSPGFLGLHLGNEGFWSRSGFGRGVVIGILDTGILPSHPSFGDDGLQPPPKGWKGTCEFKSIAGGGCNNKIIGARAFGSAAVNSTAPPVDDAGHGTHTASTAAGNFVENANIRGNADGTASGMAPHAHLSIYKVCTRSRCSIMDIIAGLDAAVKDGVDVLSFSIGAYSGTQFNYDPIAIAAFKATERGIFVSCAAGNAGPEPGTVGNGAPWMLTVAAGTMDRAIRTNVKLGNGEEFHGESLFQPRNNSAADPVPLVYPGADGFDASRDCSVLRGAEVAGKVVLCESRGLSDRVEAGQTVAAYGGVGMIVMNKEAEGYTTFADAHVLPASHVSYESGSKILAYLNSTANGTASIDFKGTIIGSYPSPAVTFFSSRGPSKASPGILKPDITGPGMNILAAWAPSDSHTEFSDGGADLSFFVESGTSMSTPHLSGVAALLKSLHPDWSPAAIKSAMMTTSDAVDRTGLPIKDEQYRHATFYALGAGYVNPALAFDPGLVYDLRADDYIPYLCGLGLGDDGVTEIAHRPVACGGLRAVTEAELNYPSLIVNLLAQPIAVNRTVTNVGKASSVYTAVVDMPKDVSVTVQPPTLRFTALDEKQSFTVTVRWAGQPNVAGAEGNLKWVSDDYIVRSPLVIPAKGE

SEQ ID NO: 3696 - protein, 759 aa, Oryza sativa Indica Group
MEWSSMRWWCLAVVLLLSTPLLAAGYLQERKNYIVHLEPRDEAAAAAGDASVEEWHRSFLPQVAKLDSDSDGADGGPRIVYSYSDVFTGFAARLTDEEAEAVRATAGCLRLYPEEFLPLATTRSPGFLGLHLGNEAFWSHSGFGRGVVIGILDTGILPSHPSFGDDGLQPPPKNWKGTCEFKAIAGGGCNNKIIGARAFGSAAVNSSAPPVDDAGHGTHTASTAAGNFVENANVRGNADGTASGMAPHAHLAIYKVCTRSRCSIMDIIAGLDAAVKDGVDVLSFSIGASSGTQFNYDPIAIAGFKAMERGIVVSCAAGNSGPDPGTVGNGAPWMLTVAAGTMDRAIRTTVRLGNGDEFDGESLFQPGNNSAANPLPLVYPGADGSDTSRDCSVLRGAEVTGKVVLCESRGLNGRIEAGQTVAAYGGAGIIVMNRAAEGYTTFADAHVLPASHVSFDAGTKIAAYVNSTDNPTASIAFKGTVIGSSPSPAVTFFSSRGPSKASPGILKPDITGPGMNILAAWAPSESHTEFSDGVGLSFFVESGTSMSTPHLSGIAALLKSLHPDWSPAAIKSAIMTTSDAVDRTGVPIKDEQYRHATFYAMGAGYVNPALAFDPGLVYDLHADDYIPYLCGLGIGDDGVKEIAHRPVTCSDVKTITEAELNYPSLVVNLLAQPITVNRTVTNVGKPSSVYTAVVDMPKDVSVIVQPPMLRFTELKEKQSFTVTVRWAGQPNVAGAEGNLKWVSDEHIVRSPIIIPATAA

SEQ ID NO: 3697 - protein, 759 aa, Oryza sativa Japonica Group
MEWSSMRWWCLAVVLLLSTPLLAAGYLQERKNYIVHLEPRDEAAAAAGDASVEEWHRSFLPQVAKLDSDSDGADGGPRIVYSYSDVFTGFAARLTDEEAEAVRATAGCLRLYPEEFLPLATTRSPGFLGLHLGNEAFWSHSGFGRGVVIGILDTGILPSHPSFGDDGLQPPPKNWKGTCEFKAIAGGGCNNKIIGARAFGSAAVNSSAPPVDDAGHGTHTASTAAGNFVENANVRGNADGTASGMAPHAHLAIYKVCTRSRCSIMDIIAGLDAAVKDGVDVLSFSIGASSGTQFNYDPIAIAGFKAMERGIVVSCAAGNSGPDPGTVGNGAPWMLTVAAGTMDRAIRTTVRLGNGDEFDGESLFQPGNNSAANPLPLVYPGADGSDTSRDCSVLRDAEVTGKVVLCESRGLNGRIEAGQTVAAYGGAGIIVMNRAAEGYTTFADAHVLPASHVSFDAGTKIAAYVNSTDNPTASIAFKGTVIGSSPSPAVTFFSSRGPSKASPGILKPDITGPGMNILAAWAPSESHTEFSDGVGLSFFVESGTSMSTPHLSGIAALLKSLHPDWSPAAIKSAIMTTSDAVDRTGVPIKDEQYRHATFYAMGAGYVNPALAFDPGLVYDLHADDYIPYLCGLGIGDDGVKEIAHRPVTCSDVKTITEAELNYPSLVVNLLAQPITVNRTVTNVGKPSSVYTAVVDMPKDVSVIVQPPMLRFTELKEMQSFTVTVRWAGQPNVAGAEGNLKWVSDEHIVRSPIIIPATAA

SEQ ID NO: 3698 - protein, 754 aa, Oryza sativa Japonica Group
MRTQRILLAVVVSMVVSSAMLAVVSCARERKNYVVHLDPREDGGVADSVELWHRSFLPEATPEAAGDDGPRIIYSYSHVLSGFAAQLTDDEAEAMRKKEGCIRLYPEEFLPLATTHSPGFLGLHLGNDGFWSRSGFGRGVVIGLLDTGILPSHPSFGDAGMPPPPKKWKGTCEFKAISGGGCNNKIIGARAFGSAAVNATAPPVDDAGHGTHTASTAAGNFVENADVRGNAHGTASGMAPHAHLAIYKVCTRSRCSIMDIIAGLDAAVKDGVDVLSFSIGASPGAPFNYDLVAIATFKAMEHGIFVSSAAGNDGPVAATVGNGAPWMLTVAAGTMDRAIRTTVTLGNGQVFDGESLYQPRNNTAGRQLPLVFPGLNGDSDSRDCSTLVEEEVSGKVVLCESRSIVEHVEQGQTVSAYGGAGMILMNKPVEGYTTFADAHVLPASHVSYAAGSKILSYIKSTPKPTASVTFKGTVMGSSPAPSVAFFSSRGPNKASPGVLKPDITGPGMNILAAWAPGEMHTEFADGVSLSFFMESGTSMSTPHLSGIAAIIKSLHPTWSPAAIKSAIMTSSDVADHDGVPIKDEQYRSASFYTMGAGYVNPSRAVDPGLVYDLHTNDYIAYLCGLGIGDDGVKEITHRRVSCAKLKAITEAELNYPSLVVKLLSQPITVHRIVTNVGKANSVYTAVVDMPKNVAVTVHPPLLRFSRAYEKQSFTVTVRWAGQPAVAGVEGNLKWVSDEHVVRSPIVIPPAKAVV

SEQ ID NO: 3699 - protein, 755 aa, Sorghum bicolor
MRTPRSLLPLLLVLLSAAALLTVADSQERKNYVVHLEPRDDAGGDSAGSLEEWHRSFLPEATLDSAADDGPRIIHSYSHVLTGFAARLTDAEAEALRSKEGCLRLYPEEFLPLATTHSPGFLGLHMGKDGFWSRSGFGRGVVIGLLDTGILPSHPSFNDAGLPPPPKKWKGTCQFRSIAGGGCSNKVIGARAFGSAAINNTAPPVDDAGHGTHTASTAAGNFVQNADVRGNAHGTASGMAPHAHLAIYKVCTRSRCSIMDIVAGLDAAVKDGVDVLSFSISATDGAQFNYDLIAIATFKAMEHGIFVSAAAGNDGPTAGSITNGAPWMLTVAAGTMDRAIRTTVRLGNGQEFDGESLFQPRNNTAGRPLPLVFPGRNGDPEARDCSTLVETEVRGKVVLCESRSITEHVEQGQMVSAYGGAGMILMNKAAEGYTTFADAHVLPASHVSYAAGSKIAAYVKSTPKPTATITFRGTVMSSSPAPSVAFFSSRGPNKASPGILKPDITGPGMNILAAWAPSEMHPQFADDVSLTFFMESGTSMSTPHLSGIAAIIKSLHPSWSPAAIKSAIMTSSNTADHTGVPIKDEQYRRASFYGMGAGYVNPSRAVDPGLVYDLSAGEYVAYLCGLGLGDDGVKEITGRRIACAKLKAITEAELNYPSLVVKLLSHPITVRRTVTNVGKANSVYKAVVDMPKGVSVVVRPPMLRFTKVNEKQSFTVTVRWNGPPAVGGAEGNLKWVSSEHEVRSPIVIPPAKAAA

SEQ ID NO: 3700 - protein, 760 aa, Hordeum vulgare subsp. vulgare
MSMRSLVAAVFPLLLAQLLLGACHGQQDGRKNYVVHLEPREDEDGGAALPVEEWHRSFLPVAAPSSAGDGAGAGPRIIYSYSHVLTGFAARLSDAEADALRRRDGCIRLYPEEFLPLATTHSPGFLGLHLGKDGFWSRSGFGKGVVIGLLDTGILPSHPSFGDAGMPPPPKKWKGACEFKAIAGAGGCNNKVIGARAFGSAAVNDTAPPVDDAGHGTHTASTAAGNFVENADVRGNAHGTASGMAPHAHLAVYKVCSRSRCSIMDVIAGLDAAVKDGVDVISMSIDVSDGAQFNYDLVAVATYKAIERGIFVSAAAGNAGPTAGSVSNCAPWMLTVAAGTTDRAIRTTVKLGNGQEFDGESLFQPHNNSAGRPVPLVFPGASGDPDARGCSSLPDSVSGKVVLCESRGFTQHVEQGQTVKAYSGAGMILMNKPEEGYTTFANAHVLPASHVSNAAGSKITAYFKSTPNPTASITFKGTVLGISPAPTVAFFSSRGPSKASPGILKPDISGPGMNILAAWAPSEMHPEFIDDVSLAFFMESGTSMSTPHLSGIAAVIKSLHPSWSPAAIKSALMTSSDIADHAGVPVKDEQYRRASFFTMGAGYVNPSRAVDPGLVYDLSPNDYIPYLCGLGYGDDGVKEIVHRRVDCAKLKPITEAELNYPSLVVKLLSQPITVRRTVKNVGKADSVYTAVVDMPKEVSVTVRPPMLRFTKVNERQSFTVTVRWAGKQPAVAGAEGNLKWVSPEHVVRSPIVVPPAKVVA

SEQ ID NO: 3701 - protein, 745 aa, Zea mays
MRTQRNLLPLLLLLSAALLAVADAQERKNYVVHLEPRDGGGSVEEWHRSFLPEATLDSAADDGPRIIHSYSHVLTGFAASLTDAEAETLRRKEGCLRLYPEEFLPLATTHSPGFLGLHMGKHGFWGRSGFGRGVVIGLLDTGILPTHPSFGDAGMPPPPKKWKGACQFRSVAGGGCSNKVIGARAFGSAAINDTAPPVDDAGHGTHTASTAAGNFVQNAGVRGNAHGRASGMAPHAHLAIYKVCTRSRCSILDIVAGLDAAVRDGVDVLSFSIGATDGAQFNYDLIAIATFKAMERGIFVSAAAGNDGPAAGSITNGAPWMLTVAAGTTDRAIRTTVRLGNGQEFHGESLFQPRNNTAGRPLPLVFPEARDCSALVEAEVRGKVVLCESRSISEHVEQGQTVAAYGGAGMVLMNKAAEGYTTFADAHVLAASHVSHAAGSRIAAYARSAPSPTASIAFRGTVMGSSPAPSVAFFSSRGPNRASPGILKPDITGPGMNILAAWAPSEMHPEFADDVSLPFFVESGTSMSTPHLSGIAAVIKSLHPSWSPAAVKSAIMTSSDAADHAGVPIKDEQYRRASFYSMGAGYVNPSRAVDPGLVYDLGAGDYVAYLCGLGIGDGGVKEITGRRVACGGKRLKPITEAELNYPSLVVKLLSRPVTVRRTVTNVGKASSMYRAVVDMPSRAVSVVVRPPTLRFDRVNEKRSFTVTVRWSGPPAAGGVEGNLKWVSRDHVVRSPIVIPPAKATA

SEQ ID NO: 3702 - protein, 748 aa, Zea mays
MRTQRNLLPLLLLLSAALLAVADAQERKNYVVHLEPRDDDGGGGSVEEWHRSFLPEATLDSAADDGPRIIHSYSHVLTGFAASLTDAEAQTLRRKEGCLRLYPEEFLPLATTHSPGFLGLHMGKHGFWGRSGFGRGVVIGLLDTGILPTHPSFGDAGMPPPPKKWKGACQFRSVARGGCSNKVIGARAFGSAAINDTAPPVDDAGHGTHTASTAAGNFVQNAGVRGNAHGRASGMAPHAHLAIYKVCTRSRCSILDIVAGLDAAVRDGVDVLSFSIGATDGAQFNYDLIAIATFKAMERGIFVSAAAGNDGPAAGSITNGAPWMLTVAAGTTDRAIRTTVRLGNGQEFHGESLFQPRNNTAGRPLPLVFPEARDCSALVEAEVRGKVVLCESRSISEHVEQGQTVAAYGGAGMVLMNKAAEGYTTFADAHVLAASHVSHAAGSRIAAYARSAPRPTASIAFRGTVMGSSPAPSVAFFSSRGPNRASPGILKPDITGPGMNILAAWAPSEMHPEFADDVSLPFFVESGTSMSTPHLSGIAAVIKSLHPSWSPAAVKSAIMTSSDAADHAGVPIKDEQYRRASFYSMGAGYVNPSRAVDPGLVYDLGAGDYVAYLCGLGIGDGGVKEITGRRVACGGKRLKAITEAELNYPSLVVKLLSRPVTVRRTVTNVGKASSVYRAVVDMPSRAVSVVVRPPTLRFDRVNEKRSFTVTVRWSGPPAAGGVEGNLKWVSRDHVVRSPIVIPPAKAAA

SEQ ID NO: 3703 - protein, 642 aa, Sorghum bicolor; identical to SEQ ID NO: 1061

SEQ ID NO: 3704 - protein, 640 aa, Zea mays
MDCGHHGVVPRPEHQAPPNCCATEVPQSPTLSSEEFLQFKRKATTIVEEYFSTDDVAATANELRELRVPCYHFYFVKKLVSVAMDRHDREKEKAAVLLSSLYGDVVDRPQLCKAFCKLTESCDDLSVDTPDAVDILAVFVARAVVDDMLPPAFLATQSARLPHGCKGAKVLRRAEKSYLSVPHHGEIVLQRWGGSKRITVEEAKAKISDILEEYLAGGDRSEALRCVRDLKIPFFHHDVVKRALVLAVERGRAAEGLILDLLKSASEEGVINESQITKGFDRLIDSLDDLALDVPNARCLLKSVIHKASSEGWLSESCLKPLPPEPKKGSEVDDATVRQFKEKAVLIIKEYFLTGDIIEVMSWLEAENYSCCPSFNAIFVQKLVNAAMDRKSREKEMASVLLSSLCMPPEDVVAGFHLLIDAAEDAALDNPAIVEDLTMFFARSVVDEVIAPSDLEALEEDAGRVKADGSAGMLALRNAHALLGAKLSAERILRCWGGGGSGKAGWELDEVKDKIGKLLQEYDCGGDIREACRCIKDLAMPFFHHEVVKKALVAIIEKRGRDERLWGLLSECYGRGLITPNQMTKGFDRMADCVDDLALDVPDAAKQLGCCIERAKKDGWLDPSFSMTTPGLPVANGVCS

SEQ ID NO: 3705 - protein, 638 aa, Oryza sativa Japonica Group
MSPMESRPDDLVPPAMHKPAIQCAAAEDASLLRSPTVSSEEFMQFKRKATTILEEYFSTDDVAATANELRELRVPCYHYYFVKKLVSVAMDRHDREKEMAAVLLSSLYGDVIDRPQVYKGFGKLAESCDDLSVDTPDAVDILAVFVARAIIDDILPPAFLAKQLTCLPEGCKGAEVLHRAEKSYLSVPHHGEIILQRWGGSKSITVEEAKAKIADILEEYLAAGDIGEACRCIRGLKISFFHHDIVKRALTLAMERGGGAEGHILDLLKSASDEGIINESQITKGFNRLIDSVDDLTLDVPNARRLLKSMILKASSEGWLCASSLKPLGPEPKKAVVEDDAAVRQFKAKTLSIIKEYFLTGDIIEVMSSLEAENYACSSSYNAIFVKKLITSAMDRKSREKEMASVLLSSLGMPPEDVVSGFHLLIESAEDAALDNPAIVEDLTMFFARSVVDEVIAPSNLEKMEEEAGRGKPGGSSTGLLALRNARALLGAKLSAERILRCWGGGATGKAGWELDDVKDKIGRLLQEYDCGGDIREACQCIKELGMPFFHHEVVKKALVAIMEKRGKDERLWGLLAECYGRGLITPNQMTKGFERVAGCVDDLALDVPDAGKQLCCYVERAKKGGWLDASFPNGVRS

SEQ ID NO: 3706 - protein, 635 aa, Oryza sativa Japonica Group
MESRPDDLVPPAMHKPAIQCAAAEDASLLRSPTVSSEEFMQFKRKATTILEEYFSTDDVAATANELRELRVPCYHYYFVKKLVSVAMDRHDREKEMAAVLLSSLYGDVIDRPQVYKGFGKLAESCDDLSVDTPDAVDILAVFVARAIIDDILPPAFLAKQLTCLPEGCKGAEVLHRAEKSYLSVPHHGEIILQRWGGSKSITVEEAKAKIADILEEYLAAGDIGEACRCIRGLKISFFHHDIVKRALTLAMERGGGAEGHILDLLKSASDEGIINESQITKGFNRLIDSVDDLTLDVPNARRLLKSMILKASSEGWLCASSLKPLGPEPKKAVVEDDAAVRQFKAKTLSIIKEYFLTGDIIEVMSSLEAENYACSSSYNAIFVKKLITSAMDRKSREKEMASVLLSSLGMPPEDVVSGFHLLIESAEDAALDNPAIVEDLTMFFARSVVDEVIAPSNLEKMEEEAGRGKPGGSSTGLLALRNARALLGAKLSAERILRCWGGGATGKAGWELDDVKDKIGRLLQEYDCGGDIREACQCIKELGMPFFHHEVVKKALVAIMEKRGKDERLWGLLAECYGRGLITPNQMTKGFERVAGCVDDLALDVPDAGKQLCCYVERAKKGGWLDASFPNGVRS

SEQ ID NO: 3707 - protein, 678 aa, Hordeum vulgare subsp. vulgare
PAGVSCPKAPPSGEAICTSRRLIGLYNNGVAESQSPMEEGFAPPARQSPIKCPTAAEDVEQLPTPTVSSEEFLQFKRKATTIVEEYFSTDDVAATATELRELRVPCYHYYFVKKVVSVAMDRHDREKEMAAVLLSSLYGDVIDRPQVYKGFCKLAESCDDLSVDTPDAVDILAVFVARAIVDDILPPAFLAKQLPCLPDGCKGAEVIRRAEKSYLSVPHHGEIILQRWGGIKSITVEEAKARIADILEEYLAAGDTAEAFRCIRELNIPFFHHDVVKRALVLAIERGGAAEGHILDLLKSASDQGVINESQIIKGFNRMIDSVDDLTLDVPNARCLLKSIILKASSEGWLCASSLKPLGSEPKKVVEDDPAVKRFKAKAVASIHEYFLTGDIIESVSRLEAENSSCSCFFNAIFVKKLISFAMDRKNREKEMASVLLSSICMPPEHVVAGFHLLVDCAEDAALDNPAIVEDLTMFFARSVVDEVIAPSDLEAVEEEAGRRKAAGSPGMLAVRNAHAMLGAKLSAERILRCWGGGGTGKAGWELNEVKDKIGKLLQEYDSGGGVREACRCIKELGMPFFHHEVVKKALVAIIEKRGKDERLWGLLSECYGRGLITPNQMTKGFQRVADCVDDLVLDVPDAGEQLGRYVERAKKGGWLDASFSVVKPGQAAAPDGIAVCS

SEQ ID NO: 3708 - protein, 612 aa, Oryza sativa Japonica Group
MESRPDDLVPPAMHKPAIQCAAAEDASLLRSPTVSSEEFMQFKRKATTILEEYFSTDDVAATANELRELRVPCYHYYFVKKLVSVAMDRHDREKEMAAVLLSSLYGDVIDRPQVYKGFGKLAESCDDLSVDTPDAVDILAVFVARAIIDDILPPAFLAKQLTCLPEGCKGAEVLHRAEKSYLSVPHHGEIILQRWGGSKSITVEEAKAKIADILEEYLAAGDIGEACRCIRGLKISFFHHDIVKRALTLAMERGGGAEGHILDLLKSASDEGIINESQITKGFNRLIDSVDDLTLDVPNARRLLKSMILKASSEGWLCASSLKPLGPEPKKAVVEDDAAVRQFKAKTLSIIKEYFLTGDIIEVMSSLEAENYACSSSYNAIFVKKLITSAMDRKSREKEMASVLLSSLGMPPEDVVSGFHLLIESAEDAALDNPAIVEDLTMFFARSVVDEVIAPSNLEKMEEEAGRGKPGGSSTGLLALRNARALLGAKLSAERILRCWGGGATGKAGWELDDCIKELGMPFFHHEVVKKALVAIMEKRGKDERLWGLLAECYGRGLITPNQMTKGFERVAGCVDDLALDVPDAGKQLCCYVERAKKGGWLDASFPNGVRS

SEQ ID NO: 3709 - protein, 512 aa, Hordeum vulgare subsp. vulgare
MGDFNVALVIVAAVVSVLVLLVSVYLLVNYQHPDDANQAYFPKLVVVLGITVAVLSILMLPADVANRQACKRAVYSGACSLTLPMKTLWLVVYIIDAVLVFLVIPFAMFYYEGDQDKSVGKRLKSALIWVVASAVVCGLVLGILYALIGKVDFTVRHLSSSVQTFPGPNQFGAFTSGQPCIAPLTRQCSANTAPANSQTTWTMRATFPEYVVALATIVGSVLFTIFGGVGIACLPLSLIFSFVRRPKAVITRSQYIKEATELGKKAKELKKAAEALHQEERSGNKGRKWRKNVKAVEKELLLLENDMNALEEMYPQGEKAEATWAFTVLAYIGKLIFGIVGLIVSIAWVAHIIIYLLVDPPLSSFLNEIFIKLDSVWGLLGTAAFAFFCFYLLIAVIAGEMMLGLKLVFITIHPMKWGGTLMNSFLFNVGLILLCSISVIQFCATAFAYYAQATAAQEIFGHTLQSLRGIKYLYKYNVFQYGFVALAILTLFYYALFGWRKRKPTGRFQLSN

SEQ ID NO: 3710 - protein, 510 aa, Zea mays
MGDFNVALVIVAAVVSVLVLLVSVYLLVNYQHPDDVNQAYFPKLVVVLGLTVAVLSILMLPADVANRQACRKAVYNGACSLTLPMRTLWLVVYIVDAVLVFLVIPFAMFYYEGDQDKSVGKRLRTALIWVVASAVVCGLVLGILYGLVGKVDFTVRHLSSSVQTFPNSFSGFSSGQPCFSPLTRQCAASTAPANSQTTWTMRATFPEYVVALTTIVGSVLFTIFGGVGIACLPLGLIFSFVRRPKAVITRSQYIKEATELGKKARELKKAAEALHQEERSGNKGRKWRKNVKALEKELLLLEDDMKALEEMYPQGEQAEATWAFTVLGYIGKLLFGVVGLIVSIAWVAHIVIYLLIDPPLSSFLNEVFIKLDGVWGLLGTAAFAFFCFYLLIAVIAGEMMLGLKLVFITIHPMKWGGTLMNSFLFNVGLILLCSISVIQFCATAFAYYAQATAAQEIFGHTLQSLRGIKYLYKYNVFQYGFVALAILTLFYYAIFGWRKRKPTGRFQLSN

SEQ ID NO: 3711 - protein, 510 aa, Oryza sativa Japonica Group
MGDFNVALVIVAAVVSVLVLLVSVYLLINYQHPDDANQAYFPKLVVVLGITVALLSILMLPADVANRQACRRAIYSGACSLTLPMKTLWLAVYIADAVLVFLVIPFAMFYYEGDQDKSVGKRLTSALLWVAVSAVVCGLILGILYGLVGKVDFTVRHLSSAVETFPNSFTSFSTGQPCISTSPKQCAAYTAPANSQTTWTMRATFPEYVVALATIVGSVLFTIFGGVGIACLPLGLIFSFVRRPKAVITRSQYIKEATELGKKARELKKAAEALHQEEKSGKKGRKWRKNVKALGKELVLLEDDMKALEEMYPQGEQAEATWALTVLGYIGKLLFGAVGLIISIAWVAHIVIYLLIDPPLSSFLNEIFVKLDGVWGLLGTAAFAFFCFYLLIAVIAGEMMLGLKLVFITIHPMKWGGTLMNSFLFNVGLILLCSISVIQFCATAFAYYAQATAAQEIFGHTLQSLRGIKYLYKYNVFQYGFVALAILTLFYYAIFGWRKRKPTGRFQLSN

SEQ ID NO: 3712 - protein, 509 aa, Arabidopsis lyrata subsp. lyrata
MGDFNLALVIVAIVVCVLVFISSIYLLVNYQHPDDANQAYFPKFVVVFGLSIAMISILMLPADVANRHACRHSIYNGACNLTLPMKELWLAVYIVDAVLVFFIIPFAMFFYEGDQDKALGKRIKSALIWVVTTAVVCALVLGILYGVIGKVDFSVRHLSSATTTFPTSWQFSNNQPCIGNTARQCSAYTANAASEKTWSMRTTFPEYVVALATIVGSVLFTIFGGVGIACLPLGLITAFIRRPKAVITRSQYIKEATELGKKARDLKKAADALHQEERSGAKGRKWRKNVKAVEKELLQLEEDVNLLEEMYPQGEQAETAWAFTVLGYLAKFILGILGLIVSVAWIAHIIIYLLVDPPLSPFLNEVFIKLDDVWGLLGTAAFAFFCFYLLLSVIAGAMMLGLKLVFITIHPMKWGATLMNSFLFNVGLILLCSISVIQFCATAFGYYAQATAAQEIFGHTLQSLRGIKYLYKYNVFQIGFVVLAGLTFLYYIAFGWRRKKPSGRFQLST

SEQ ID NO: 3713 - protein, 509 aa, Ricinus communis
MGDFNLALVIVAIVVCIVVLLFNVYLLVNYQHPDDKNQAYFPKFVVVLGLSVALISILMLPADVANRQACRHAIYNGACNLTLPMKDLWIAVYIIDAVLVFFIIPFAMFYYEGDQDKSVGQRIKSALVWVITTAIVCGLVLGILYGLVGKVDFTVRHLSSTTTNFPSTWEFSSGQPCIGSGARQCSAYLANASSEKTWSMRTTFPEYVVALATIVGSVLFAIFGGVGIACLPLGLIFSFIRRPKAVITRSQYIKEATELGKKARELKKAADALHQEERSGSKGRKWRKNVKAVEKELFQLEEDVKLLEEMYPQGEKAETSWALTVLGYLAKLVLGILGLIVSVAWVAHIVIYLLISPPLSPFLNEVFIKLDDVWGLLGTVAFAFFCFYLLLAVIAGAMMLGLRLVFITIHPMKWGGTLMNSFLFNVGLILLCSISVIQFCSTAFGYYAQATAAQEIFGHTLQSLRGIKYLYKYNVFQYAFIVLAVVTLLLYAAFGWRRKKPTGRFQLSS

SEQ ID NO: 3714 - protein, 509 aa, Arabidopsis lyrata subsp. lyrata
MGDFNLALVIVAIVVCVIVFISSIYLLVNYQHPDDANQAYFPKFVVVFGLSIAMISILMLPADVANRHACRHAIYNGACNLTLPMKDLWLAIYIVDAILVFFVIPFAMFFYEGDQDKTLGKRIKSALIWVVTTAVVCALVLGILYGVIGKVDFSVRHLASATSTFPTSWQFSNTQPCIGNTARQCSAFTANATSEKTWTMRTTFPEYVVALATIVGSVLFTIFGGVGIACLPLGLITAFIRRPKAVITRSQYIKEATELGKKARELKKAADGLHQEERSGAKGRKWRKNVKAVEKELLQLEEDVNLLEEMYPQGEQAETAWAFTVLGYLAKFILGILGLIVSIAWVAHIIIYLLVDPPLSPFLNEVFIKLDDVWGLLGTAAFAFFCFYLLLAVIAGAMMLGLKLVFITIHPMKWGATLMNSFLFNVGLILLCSISVIQFCATAFGYYAQATAAQEIFGHTLQSLRGIKYLYKYNVFQIGFVILAGLTFLYYIAFGWRRKKPSGRFQLSS

SEQ ID NO: 3715 - protein, 509 aa, Arabidopsis thaliana
MGDFNLALVIVAIVVCVIVFISSIYLLVNYQHPDDANQAYFPKFVVVFGLSIAMISILMLPADVANRHACRHSIYNGACNLTLPMKDLWLAVYIVDAVLVFFIIPFAMFFYEGDQDKALGKRIKSALIWVVTTAVVCALVLGILYGVIGKVDFSVRHLSSATTTFPTSWQFSNNQPCIGNTARQCSAYTANAASEKTWSMRTTFPEYVVALATIVGSVLFTIFGGVGIACLPLGLITAFIRRPKAVITRSQYIKEATELGKKARDLKKAADALHQEERSGAKGRKWRKNVKAVEKELLQLEEDVNLLEEMYPQGEQAETAWAFTVLGYLAKFVLGILGLIVSVAWIAHIIIYLLVDPPLSPFLNEVFIKLDDVWGLLGTAAFAFFCFYLLLAVIAGAMMLGLKLVFITIHPMKWGATLMNSFLFNVGLILLCSISVIQFCATAFGYYAQATAAQEIFGHTLQSLRGIKYLYKYNVFQIGFVVLAGLTFLYYIAFGWRRKKPSGRFQLST

SEQ ID NO: 3716 - protein, 509 aa, Arabidopsis thaliana
MGDFNLALVIVAIVVCVIVFISSIYLLVNYQHPDDANQAYFPKFVVVFGLSIAMISILMLPADVANRHACRHAIYNGACNLTLPMKDLWLAIYIVDAILVFFVIPFAMFFYEGDQDKTLGKRIKSALIWVVTTAVVCALVLGILYGVIGKVDFSVRHLASATSTFPTSWQFSNTQPCIGNTARQCSAFTANPTSEKTWTMRTTFPEYVVALATIVGSVLFTIFGGVGIACLPLGLITAFIRRPKAVITRSQYIKEATELGKKARELKKAADGLHQEERSGAKGRKWRKNVKAVEKELLQLEEDVNLLEEMYPQGEQAETAWAFTVLGYLAKFILGIVGLIVSIAWVAHIIIYLLVDPPLSPFLNEVFIKLDDVWGLLGTAAFAFFCFYLLLAVIAGAMMLGLKLVFITIHPMKWGATLMNSFLFNVGLILLCSISVIQFCATAFGYYAQATAAQEIFGHTLQSLRGIKYLYKYNVFQIGFVILAGLTFLYYIAFGWRRKKTSGRFQLSS

SEQ ID NO: 3717 - protein, 509 aa, Vitis vinifera
MGDFNLALVIVAIVVCVLVFLFNIYLLVNYQHPDDANQAYFPKFVVVLGLSIAAISILMLPADVANRQACRHAIYNGACNFTLPMRDLWLAIYIVDAVLVFFVIPFAMFYYEGDQDKSVGKRIKSALLWVITTAIVCALVLGILYGLVGKVDFTVRHLSSSTTSFPTSWELSSSQQCIGSGTHQCSAYSASASSEKTWTMRTTFPEYVVALATIVGSVLFSIFGGVGIACLPLGLIFSFIRRPKAVITRSQYIKEATELGKKARDLKKAADALHQEERSGSKGRKWRKNVKAVEKELLQLEDDVKALEEMYPQGEKAETTWALTVLGYLAKLVLGILGLIVSVAWIAHIVIYLLIDPPLSPFLNEVFIKLDDVWGLLGTAAFAFFCFYLLLAVIAGAMMLGLRLVFITIHPMKWGATLMNSFLFNVGLILLCSISVIQFCATAFGYYAQATAAQEIFGHTLESLKGIKYLYKYNVFQIAFIVLAGLTFVYYAAFGWRRRRPSGRFQLSS

SEQ ID NO: 3718 - protein, 509 aa, Populus trichocarpa
MGDFNLALVIVAIVVCIIVFLFNIYLLVNYQHPDDKNQAYFPKFVVVFGLFVATISILMLPADVANRQACRHAIYNGACNLTLPMKDLWIAVYIVDAVLVFFIIPFAMFYYEGDQDKSVAKRIKSALLWVITTAIVCGLVLGILYGLVGKVDFTVRHLSSTTTTFPSTWEFSRNQPCIGSVARECSAYLANASSEKTWTMRATFPEYVVALATIVGSVLFAIFGGVGIACLPLGLIFSFIRRPKAVITRSQYIKEATELGKKARELKKAADVLHQEERSGNKGRKWRKNVKAVEKELLQLEEDVKLLEEVYPQGEKAETSWALTVLGYLAKLVLGILGLIVSVAWVAHIIIYLLIDPPLSPFLNEVFIKLDDIWGLLGTVAFAFFCFYLLLAVIAGAMMLGLRLVFITIHPMKWGATLMNSFLFNVGLILLCSISVIQFCATAFGYYAQATAAQEIFGHTLQSLRGIKYLYKYNVFQIAFVVLAGLTFVYYAAFGWRRKKPSGRFQLSS

SEQ ID NO: 3719 - protein, 894 aa, Hordeum vulgare subsp. vulgare
PARSLPRMAPRLLLLALVAAAVAVPPASAAVASIDLGSEWLKVAAVHLAPGRAPIAVAINEMSKRKSPALAALADGNRLAGEEAAGITARHPAKVFSRMRDLLAKPFPYARALADSLFLPYDLVQDARGAAAVRADDGQVYTVEEIVAMVLHYASGIADAHVGLPVRDAVVAVPPYFGQAERRALTQAAQLAGFNVLALVNEHAGAALQYGIDKDFSNESRHVIFYDMGSGSTYAALVYYSSYSAKEFGKTVSVNQFQVKDVRWNSKLGGLEMEMRLVNYFADQFNKQLGNGDDIRQSPKAMAKLKKQVKRTKEILSANTAAPISVESLYNDIDFRSTITREKFEELCEDLWEQALTPIKDVLAQSGMKISDIYAVELIGGATRVPKLQAKLQEFLGRSELDKHLDADEAIVLGASLHAANLSDGIKLNRKLGMIDGSTYGFVFEIDGPDYVKDESTDQVLVPRMKKMPIKLFRSIKHTKDFDVSLSYDKASELPPGVLSHKFADYAISGLTETTEKYGSRNLSAPIKANLHFSLSRSGIISLDRAEAVIEITEWVEVPKKNVTLETNTTDQTLSAESGTSDSTTDSKENSSSGSDADNSSTTNDESNVQDTITEKVLKKRTFRVPLKVTEKTAGAASILSKELYSEAKSRLNVLNKKDAERRRTAELKNNLESYIYSMKEKLEESTDMLTVSTEQERESFTEKLSEVQDWLYMDGEEAQANEFQERLDQLKAMGDPILFRMSELKARPAACGSARLYLTELQKIVKNWETSKPWLPKKRVDEVVSEADKLKAWLEEKEALQKSTPVHSLPAFTSEEVYKKVLALQDKVSSVNRIPKPKPKVEKKPPKEDANKDKTDSSESASSEPEPESTEKSSESDAPEKTNDSEPESHDEL

SEQ ID NO: 3720 - protein, 463 aa, Sorghum bicolor
MALALSLSLSLSLLLVGGVVVRAQPFDYPTAKPSTRWANTDASLPHHVTYADGSVARAALLRLNPAGYGPSYAFGFFCTNHQAPPCAEFLLAVAVVYCNSGGLMTSVVAGIPQVVWSANRGQPVGEGASAELTAAGDLVLRSATGAVVWSSGTAGRSVAAMAVTRDGNLVLLDARNATVWQSFDHPTDALLVGQSLRAGARLVANSSAANWSASRLYLTVADDSLSAYVDAKPPQRYYHLGFSKAAGAYATYANGSLAVFDPAAAPAASTPPLATIQLPEVGAGTVQYMRLEHDGHLRLYEWNPAGWAPVFDVLRLFPDDCAFPTVCGAYGVCTDMQCSCPDAANFRAVDFRRPNRGCVPTAPVACGGPPARLVSLPGLAYFNDPATSLKALERVSDAACRKACLDECRCAAAQFVYGADAGDGFCYLQSEVLSMETSRPEVVHYNSTMHLKVRATRRPSAGF

SEQ ID NO: 3721 - protein, 467 aa, Zea mays
MLQLALALCVLTAGGVVRAQPFDYPTAKPSTTWANTDASLPHHVTYADGSVARAALLRLNPAGYGPSYAFGFFCTNHLAPLCAEFLLGVAVVYCNSGGLMTSVVAGIPQVVWSANRGSPVGEGAAAELTAAGDLVLRSAQGAVVWSAAGTAGRSVAAMAVARDGNLLLLDARNNTVWQSFDHPTDALLVGQSLRPGARLVANSSAANWSPSRLYLTVAADDDSLSAYVDAEPPQRYYRLGFSGGGGGGGAYATYTNGSLAVFAAAAPAPTPLATIQLPAVGAGTVQYMRLEHDGHLRVYEWSSAGWAPVFDVLRLFPDDCAFPTVCGAYGVCTDMQCSCPDAANFRAVDFRRPNRGCVTVAPVAGCGGSHPPARLVSLPGLAYFNDPATSLRALERVSDAACRKACLDDCACAAAQFVYGTDAGDGFCYLQSEVLSLETSRPEVVHYNSTMHLKVRATRRPSPSARF

SEQ ID NO: 3722 - protein, 473 aa, Hordeum vulgare subsp. vulgare
MMHRATIIALIGCLLAGGGVRAQQQEQQRFDYPAARAPTTWANTDAGLPHHVVYTDGSVARVALLRLNPAGFGPSFAFGFFCTSSHGAAPCAGFLLGVAVVYCNSGALITSVTTGVPQVVWSANRASPVGEGASAELTPEGELVLRSANGSAVWSAGAKGRSVAGVTIGSDGNLVLFDGLNATVWQSFDQPTDALLVGQSLKHGARLTANASAADWRDGRFYLTVEDDALSAYVYATPPQRYFHLGFGETAVGAYATYANGSLTVSARPGAPSVAVIQLPTVVAGTVQYMRLEHDGHLRLYEWRSGSGWAPVFDVLRLFPDGGCAYPTVCGAYGVCTDDTQCSCPDAANFRAVDFRRPNRGCVPTSPPPTACGSSSSPGRRAQHRLVSLPGTGYFNDHATSMRAVERVGEEACKKACLDDCACAAAQFYYGPNAGDGFCYLQSEVFSMQTVRPEVVHYNSTMHIKVQAESARI

SEQ ID NO: 3723 - protein, 335 aa, Zea mays; identical to SEQ ID NO: 1062

SEQ ID NO: 3724 - protein, 336 aa, Oryza sativa Japonica Group; identical to SEQ ID NO: 3597

SEQ ID NO: 3725 - protein, 276 aa, Zea mays; identical to SEQ ID NO: 1063

SEQ ID NO: 3726 - protein, 675 aa, Zea mays
MSRRCSRAAFCLARSRRCSRAAMAPPPFYLPLLLAFLLLSTAAAHSQHLHLQHHGHGPHHHHHVSPSMTATARFYTAPSMHQNRMESEDARQSLRVFSPFLTPVAAQAPSAEEAMSAMVAAADAGDPARARLDPPSPPSSLLAAGDLMPSSLPLLQPQAEVVGSFESEPAAPPSVVDEQYRDEASPSPPPPAVYEPYRDAASAPPSVVDEPYSDAASPPPPPFVVYEPYRDTASPTPPVVYEPYLDAASPPPPPPVVYELYRGVASPPPPSPVVYEPYRAASPQSPVHDYAAGVVYSGSGDDLGLQQIAKVLASLGYNEMASSATLLAGSASVATWPGPITVFAAPDVFLQADSCPESECSRRHLLLDHMALGYFPYAELAAAPTTKLPSASVGFCLDVAAQPQRGPFSVHHASLYVDGVMVSEPELYDDGRYVVHGLHGFIPPLSRASCAEDAHEHPHHQVHLHQHRRHHHLSARSSAASAAIAASAVRVMIREAISRLRDGGFGFVALAMRVKFAELEKLSNLTVFALNDQAIFTGEGHGYVSAVRFHIVPEHRLTRADLLRLRPGTILPTLAGEDQKLVVTLGSGSATDEVRINYIPVKEPDVVINSRVAVHGVYVPFPRLHLANLATLVAVASDLQTNDSCGGAGGPLGDCASTPMTSTTISVDQGYGKGQ

SEQ ID NO: 3727 - protein, 642 aa, Sorghum bicolor
MAAPPFHLPLLLAFLLLSTATATAAAHSQHLHHHGHGPHTHHHHRSPSMMTATARLDTAPSMHQNRMESESEETRQSLRVLNPFFTTVAAQAPSGEDAMAAMGAAADAADTTRLDLPSPPPPLLAAVDPMPSSLAPLQPQAEEAGSSESEPAAPPPVVDEPYRDATSPPLPPPVVAEPFRDATSPPPPPLVVVETYRDATIPPPPLVVYEAYRDAASPPPPLPVVYETYRDAASPPPPPPVVDEPYRDVASPPPPVHDDAARVVSSSTGDDLGLQQIAKVLASLGYNEMASSATLLADTASVAAWPGAITVFAAPDAFLQHSCPECLRGHLLLDHMALGYFPYAELAAAPAMKLPSASVGFCLDVAAQPQRGPFSVHHASLYVNGVMVSEPELYDDGRYVVHGLHGFIPPLSHASCVDDDDAHAHPNHQVHLHQHRRHHHLSARSAATSAATAASVVRIMIREAISRLRDSGFGFVALAMRVKFAELEKLSNLTVFALDDQVIFTGGGHGYVSAVRFHIVPGHRLTRADLLLLRPGTVLPTLAGEDQKLVITLGAGSATDEVRINYIPVKEPDVVINSRVAVHGIYLPFPRLHLANLAASVAVASDLQTNDSCGVGGPFGDCASTPMTSATIPADPGYGDGQ

SEQ ID NO: 3728 - protein, 464 aa, Sorghum bicolor; identical to SEQ ID NO: 2966

SEQ ID NO: 3729 - protein, 694 aa, Zea mays
MHGRPRRPAKPEDDEAASAKAAKLRDLQAQVLHNHHARTYTKESIGLSFKLLETNPEAYTAWNYRKLALQHNVKELSDPQAIKSAIDDELRVAEVALRQNPKSYGAWYHRKWLLNQKLAPVDFKYELGLLDKLLKVDARNFHGWNYRRFLARFMGLPDDEELKYTMDKISDNFSNYSAWHNRSILLSNLLIQQSKGFESKQKIFSEEFELVTQALFTDPSDQSGWFYHLWLLAQTSSPDNPQLIASWPSNAAKLSFSFIKEKAEQHTLSSVWSRTVPIVLYFNEPVKGLNHSSVNLKSDLEFGKDIQWRPLTMADSGYSKCWATYLQITNECSSLQEYSVEMSIPCSDDIVSRSGSNYNCPVHFTFYIELISNNAAQGLDTFDKPVAWNCSDSFQSHGNRDPIPLDLLNITSALVEHDSDWHFERLSEEIDLFRELADDNSKFGKLTLARLLLACAAIKSRGRSLIERKGYCEEALGLFTDLIHLDPSHKQYYEDERSLALMDKLTCDMETFTKHCSVQVQPNSAPLHHVQFRRLSVTRIGFAERLLWVQMLDLSHNSLRSVEGLEALQRLVFLNISNNQISSFTALEPLTKIISLKVLDLSFNEIGAHSIDTARYICPSPFSHKTEASEAFEEYQEVNNINVTEYWDAILFFRSLKLAQLDIRGNAVASKDGFRTLVVTLIPCLKWFDGEGVS

SEQ ID NO: 3730 - protein, 554 aa, Zea mays
MDSPLLSTPALLALSLLLLALYIARRRRGGGKNRNYPPVAGTVFHQLLHFRRLMEYQTELAHRYRTFRMLTPTCNYVYTVEPANVEYILKTNFGNYGKGAMIHDVMEDLLGDGIFNVDGARWRHQRKVASHEFSTRVLRDYSSGVFRDTAAELAGIVAVAARGAGPGERPLDVADLLMRSTLDSMFKVGFGVDLGSLSGCGDDEGAAAFARAFDDASEQVLYRFFDPSWKVKRLLGVSSEGAMKGSIRTIDQFVYGVIDRKIKQMGRDQEFVSELSAAASPVWMHMHSRALDWRSGHFFFLLTHTDGGVCLWQAKKEDILSRFLMERESDPGCFDNKYLRDIILNFVIAGRDTTAGTLSWFLYVLCRNQHVQDRVAREVRAAATGDRDDVGVQEFVTCLTEDAISRMRYLHAVLTETLRLYPAVPIDVKYCFSDDTLPDGYAVKKGDMVNYQPYQMGRMKFLWGADAEEFRPERWINDDGVFVNESPFKFTAFQAGPRVCLGKEFAYRQMKIFAAVLVYAFRFEMWEANATMGYRPMLTLKMDGPLYVRASLRQ

SEQ ID NO: 3731 - protein, 591 aa, Zea mays; identical to SEQ ID NO: 1064

SEQ ID NO: 3732 - protein, 585 aa, Zea mays
MAFAEEETTRYLGTNLIESCGDSEDGLTGWAPSGSCTLSAHADEDASLPSLAAALSAAAGDEDSDEDEFQQRAPRPSGRYVLAARRASDKDGLCRAVSRAPIRPNVTYRVAGWVGLGAAVEGSHAVHVEVRVDGGGRPVGGGVAVVESGKWGQIKGSFRVDGDEPPRHAKVYVHGPPAGVDLKVTGMQVCAVNKIPRLRHLRKKADKVRKRDVVLKVSRRTGVDDDTTASVAGAHIQVVQVQNSVPIGSCITKAGMQNPEYVDFFTKHFDWAVLENELKWYYTEAVRGQVSYADADELIGFCDRHGKPVRGHCIFWAVENSVQPWVRALSADQLRAAVEARLRGLVSRYAGRFPHYEVNNEMLHGAFYQQRLGDDINAHMFRETAQIDPAPALFVNDYNVESANDPSATPEKYVALVTDLQRRGAPVGGIGVQGHVTHPVGDIICDALDKLAVTGLPIWITELDVSAADESVRADDLEIVLREAFAHPAVEGIMLWGFMQGHMWRSHGQLVNADGKYTQAGNMFAGLRQEWTSHARGKVDSNGNFKFRGFHGTYQVLLTTPAGEVKKRTFDVHKGDAPLVLDMDF

SEQ ID NO: 3733 - protein, 594 aa, Sorghum bicolor
MAFAEEETKTTTAAAAAHRGKNLIESSCDSEDGCLAGWAPSGSCTLSAHAEDAPLPSLAATLAAAAADDDSDDEEVQQQRARKPSGRYVVAAHRASDTDGLCRALSRAPRPKVTYRVAGWVGVGTAVEGSHAVHVEVRVDDDGQGQHVGGGVAVVESGKWGEIKGSFRVDDDDEPPRHAKVYVHGPPAGVDLKVMDLLVSPVNKIPRLRHLRKKADKVRKRDVVLKVNRRTDGDTTESVAGAHIQVIQVQNSVPIGTCITKAGMQNPEYVDFFTKHFDWAVLENELKWYYTEAVQGQVSYADADELINFCDRHGKPVRGHCIFWAVESSVQPWVRALNRDQLRAAVEARLRGLVSRYSGRFPHYEVNNEMLHGDFYAQRLGDDDINAHMFRETARIDPAPALFVNDYNVESGNDPNATPEKYVALVTDLQRRGAPVGGIGVQGHVTHPVGDIICDALDKLAVTGLPVWITELDVSAADESVRADDLEIVLREAYAHPAVEGIMLWGFMQGHMWRSHGQLVNADGKYTQAGNMFAGLRREWTSHARGKVDGNGNFKFRGFHGTYQVLLTTAAGEVKKRTFDVNKGDAPLVLDMDF

SEQ ID NO: 3734 - protein, 567 aa, Oryza sativa Indica Group
MAFTEETTHLVMNHVEHCEDGGGLAVAGWTPSGSCTLSVHDDPAPETPPPHPLSATEDDADEPRPRPSGRYVLAAHRAGERDGLCRELSRAPAAKVTYRVAGWVGLQGAGAADGCCHAVRVEVCTDDGRPVGGGVVVAEAGKWGEIMGSFRVDDDEPPRCAKVFVHGPPAGVDLKVMDLQVFAVNKIARLRHLRKKTDKVRKRDVVLKLGRRTGGTAIRVVQVENSFPIGACINKTAIQNPAFVDFFTKHFDWAVLENELKWYYTEAVQGQVSYSDADELIAFCDRHGKPVRGHCIFWAVENVVQPWVRALNGDQLRAAVEGRLRSLVTRYGGRFPHYEVNNEMLHGAFFQQRLGDDINARMFRETAQMDPSPALFVNDYNVESANDPNATPERYVELVTDLQKRGAAVGGIGVQGHVTHPVGDVICDALDRLAVTGLPVWITELDVSAADEAVRADDLEIVLREAFAHPAVEGIMLWGFMQGNMWRSHAHLVDADGKLNEAGHRYVGLRQEWTSHARGQVDGSGHFKFRGFHGKYVVQLTTGAGEMKHQQFDVGKGDGPLVLDMDL

SEQ ID NO: 3735 - protein, 575 aa, Oryza sativa Japonica Group
MAFTEVCDALSFARDNALGHEPCRALRGWRRPGSGRLDPSGSCTLSVHDDPAPETPPPHPLSATEDDADEPRPRPSGRYVLAAHRAGERDGLCRELSRAPAAKVTYRVAGWVGLQGAGAADGCCHAVRVEVCTDDGRPVGGGVVVAEAGKWGEIMGSFRVDDDEPPRCAKVFVHGPPAGVDLKVMDLQVFAVNKIARLRHLRKKTDKVRKRDVVLKLGRRTGGTAIRVVQVENSFPIGACINKTAIQNPAFVDFFTKHFDWAVLENELKWYYTEAVQGQVSYSDADELIAFCDRHGKPVRGHCIFWAVENVVQPWVRALNGDQLRAAVEGRLRSLVTRYGGRFPHYEVNNEMLHGAFFQQRLGDDINARMFRETAQMDPSPALFVNDYNVESANDPNATPERYVELVTDLQKRGAAVGGIGVQGHVTHPVGDVICDALDRLAVTGLPVWITELDVSAADEAVRADDLEIVLREAFAHPAVEGIMLWGFMQGNMWRSHAHLVDADGKLNEAGHRYVGLRQEWTSHARGQVDGSGHFKFRGFHGKYVVQLTTGAGEMKYQQFDVGKGDGPLVLDMDL

SEQ ID NO: 3736 - protein, 325 aa, Zea mays; identical to SEQ ID NO: 1065

SEQ ID NO: 3737 - protein, 305 aa, Zea mays
MSNRATHWCYACRRPIRLRGQDIACPNCNDGFIQEISEMGGILNTYGLIEPDFEERRARRFGMMDAMSSLMRQRMEEMGRDGLFDIRGRQGTGTEYGRRPTAVPTLVFGGIPSPGVDSGDVNVVLRGGRRVGAAQPNFSSLVVGPSLEALFEQLLLQNNRQGPAPAPQSAIDSMPVVKINRRHLDDDPQCAVCKDKFEVGAEAREMPCKHLYHTDCIIPWLVQHNSCPVCRHPLPSQRSGSTSSARPSAYYNEAADPPGVTRADLEPAPRDGGRESQERRRSFSFLWPFGPVEFQIHFLPVRTEC

SEQ ID NO: 3738 - protein, 345 aa, Zea mays
MSNRATHWCYACQRPIRLRGQDIICPNCSDGFIQEISEMGGVLNTYGLTEPDFEERQARRFGMMDAISSLMRQRLSEIGRDSLFDIHGRQGTGTEYGRRSTAIPTLVFGGIPSPAVGSSDVNVVIREGRRAGAARPNFSSLVVGPSLEALFEQLLLQNNRQGPPPAPQSAIDSMPVVKINRRHLDEDPQCAVCKDKFEVGAEAREMPCKHLYHTDCIIPWLVQHNSCPVCRHPLPSQRSGSSTSSARVPSAYYNETADPPAVARADLDPVPSAYYNETADPPAVTRAYFDPAPGNYGSESQESHDPFSFLWPFGPSSSYQYEENVDEPAVYDPNHIAYSAWHYDH

SEQ ID NO: 3739 - protein, 346 aa, Zea mays
MSNRATHWCYACQRPIRLRGQDIICPNCSDGFIQEISEMGGVLNTYGLTEPDFEERQARRFGMMDAISSLMRQRLSEIGRDSLFDIHGRQGTGTEYGRRSTAIPTLVFGGIPSPAVGSSDINVVIREGRRAGAARPNFSSLVVGPSLEALFEQLLLQNNRQGPPPAPQSAIDSMPVVKINRRHLDEDPQCAVCKDKFEVGAEAREMPCKHLYHTDCIIPWLVQHNSCPVCRHPLPSQRSGSSTSSARVPSAYYNETACPPAVARADFDPVPSAYYNETATDPPAVTRADFDPAPGNYGSESQESHVPFSFLWPFGPSSSYQYEENVDEPAVYDPNQIAYSAWHYDH

SEQ ID NO: 3740 - protein, 492 aa, Zea mays; identical to SEQ ID NO: 1030

SEQ ID NO: 3741 - protein, 713 aa, Sorghum bicolor
MAATTSTTAAVSFSLPSPPHRRGARRRRAPSLLHAASTTAALSPDLSIQLSPRDSPPASTNGAATALGPPVAASFARDRAEDLQAEARAMVRAAGATVYSPELLAARYGSRPFKVALRAAEVLSKLASFGVKVLLDERKGESSSERRRARAVELRTILTRLGPTFVKIGQGLSTRPDLCPAEYLEELAELQDSLPTFPDEEAFACIERELGFALDSIYSTISPSPIAAASLGQVYKARLKYSGKLVAVKVQRPGIEDAIGLDFYLLRGLGFLINKYIDIVTSDVVALMDEFARRVFQELNYVQEGQNARRFKKLYADKQDVLVPDIFWDYTSAKVLTMEWIEGVKLNQQAVIESQGLKVLDLVNIGIQCSLRQLLEYGYFHADPHPGNILATPEGKLAFLDFGMMSETPEDARVAIIGHVVHLVNRDYEAMARDYYALDFLEPDVDVSPIVPALKNFFDDALNATVSELNFKTIVDGLGAVLYQYPFNVPAYYALILRSLTVLEGLALYADPDFKVLAASYPYFAKRLLTDPNPYLRDALIELLFKDGRFRWNRLENLLVQGRQDREFAAKDALQPVLKLLLGPDGEELRVLVVKEAVRVTEAITIGTLIDSYNAAPAFLKPLISSGNPAGPFKFSEAEQEQMMDLRDQVFRVWGLLRSSNNFDPSLLQPIVQVLQEPEARVLGSRVAGGVTQRLAARLLQQLLRTPPAPGSP

SEQ ID NO: 3742 - protein, 712 aa, Zea mays
MAATTSTTPAVSFSLPSPPHRQGAPRRRAPFLLRAASTAAPPSPDLSIQLSPRASPPASTNGAATALGRPVAASFARDRAEDLQAEARAMARAAGATVYSPELLASRYGSRPFKVALRAAEVLSKLASFGVKVLLDERRGESSSERRRARAVELRSILTRLGPAFVKIGQGLSTRPDLCPVEYLEELAELQDSLPTFPDEDAFACIERELGFTLDSIYSAISPSPIAAASLGQVYKAKLKYSGKLVAVKVQRPGIEDAIGLDFYLLRGLGFLINKYVDIVTSDVVALMDEFARRVFQELNYVQEGQNARRFKKLYADKQDVLVPDIFWDYTSAKVLTMEWIEGVKLNQQAAIESQGLKVLDLVNIGIQCSLRQLLEYGYFHADPHPGNILATPEGKLAFLDFGMMSETPEDARVAIIGHVVHLVNRDYEAMARDYYALDFLEPDVDVSPIVPALKNFFDDALNATVSELNFKTIVDGLGAVLYQYPFNVPAYYALILRSLTVLEGLALYADPDFKVLAASYPYFAKRLLTDPNPYLRDALVELLFKDGRFRWNRLENLLVQGRQDREFAAKDALQPVLKLLLGPDGEELRVLVVKEAVRVTEAITIGTLIDSYNAAPAFLKPLISSGNPAGPFKFSEAEQEQMLELRDQVFRVWGLLRSSNNFDPSLLQPIVQVLQEPEARVLGSRVAGGVTQRLAARLLQQLLRIPSPGSS

SEQ ID NO: 3743 - protein, 712 aa, Zea mays
MAATTSTTPAVSFSLPSPPHRQGAPRRRAPFLLRAASTAAPPSPDLSIQLSPRASPPASTNGAATALGRPVAASFARDRAEDLQAEARAMARAAGATVYSPELLASRYGSRPFKVALRAAEVLSKLTSFGVKVLLDERRGESSSERRRARAVELRSILTRLGPTFVKIGQGLSTRPDLCPVEYLEELAELQDSLPTFPDEDAFACIERELGFTLDSIYSSISPSPIAAASLGQVYKAQLKYSGKLVAVKVQRPGIEDAIGLDFYLLRGLGFLINKYVDIVTSDVVALMDEFARRVFQELNYVQEGQNARRFKKLYADKQDILVPDIFWDYTSAKVLTMEWIEGVKLNQQAAIESQGLKVLDLVNIGIQCSLRQLLEYGYFHADPHPGNILATPEGKLAFLDFGMMSETPEDARVAIIGHVVHLVNRDYEAMARDYYALDFLGPDVDVSPIVPALKNFFDDALNATVSELNFKTIVDGLGAVLYQYPFNVPAYYALILRSLTVLEGLALYADPDFKVLAASYPYFAKRLLTDPNPYLRDALVELLFKDGRFRWNRLENLLVQGRQDREFAAKDALQPVLKLLLGPDGEELRVLVVKEAVRVTEAITIGTLIDSYNASPAFLKPLISSGNPAGPFKFSEAEQEQMLELRDQVFRVWGLLRSSNNFDPSLLQPIVQVLQEPEARVLGSRVAGGVTQRLAARLLQQLLRIPSPGSS

SEQ ID NO: 3744 - protein, 706 aa, Hordeum vulgare subsp. vulgare
MAASTSATAAVSFSLPSYPRRGLRRLRRRPSLRAASTAAPPSPDLSIQLSPRPSPRSSPPVVPSLARDRADDLQAESRAMTRAAAATVYTPELLASRYGSQPFQVALRAAEVLSKLGAFGLTLLLDQQRGESSSSAKRRARAVELRTILTRLGPTFVKIGQGLSTRPDLCPTEYLEELSELQDSLPTFPDEEAFACIEWELGFPLDSMYSAMSPSPIAAASLGQVYKARLKYSEQLVAVKVQRPGIEDAIGRDFYLLRGLGFLINKYVDIITTDAVALIDEFARRVFQELNYVQEGQNARRFKKLYADKQDILVPDIFWDYTSAKVLTMEWIEGVKLNQQAAIEGQGLKVLDLVNIGIQCSLRQLLEYGYFHADPHPGNILATPEGKLAFLDFGMMSETPEDARVAIIGHVVHMVNRDYEAMARDYYALDFLKPEVDVSPIVPALKNFFDDALDSTVSELNFKTIVDGLGAVLYQYPFNVPAYYALILRSLTVLEGLALYADPNFKVLAASYPYFAKRLLTDPNPYLRDALIELLFKDEKFRWNRLENLLVQGRQDREFVAKDALQPVLKLLLGPDGENLRVLVVKEAVRVTEAITFGTLIGSYNAAPEFLKPLISNGNPAGPFKISDVEREQMLELRDTVLRIWGLLRSSDTFDPSLLQPIVQVLQEREARVFGSRIAGGVSQRLAARLLQQLLRIPPAPVPGSS

SEQ ID NO: 3745 - protein, 620 aa, Oryza sativa Indica Group
MCSTTVWHSNSDNSGCCLLHQVALRAAEVVSKIGAFGLKVFLDEQRGQSSSAVRRARAVELRTILTRLGPTFVKIGQGLSTRPDLCPPEYLEELSELQDSLPTFPDEEAFACIERELGFPLDSIYSTISPSPIAAASLGQVYKARLKYSGQLVAVKVQRPGIEDIIGLDFYLLRGLGYLINKYVDFISSDVVALMDEFARRVYQELNYVQEGQNARRFKKLYADKQDVLVPDIFWDYTSAKVLTMEWIEGVKLNQQAAIEKQGLKVLDLVNIGIQCSLRQLLEYGYFHADPHPGNILATPEGKLAFLDFGMMSETPEDARVAIIGHVVHMVNRDYEAMARDYYALDFLEPDVDVSPIVPALKSFFDDALNSTVSELNFKTIVDGLGAVLYQYPFNVPAYYALILRSLTVLEGLALYADPNFKVLAASYPYFAKRLLTDPNPYLRDALIELLFKDGKFRWNRLENLLVQGSQDREFAAKDALQPVLKLLLGPDGEELRVLVVKEAVRVTEAITFGTLIDSYNAAPEFLKPLISSGNPAGPFKISDTEREQMIELRDRVFRIWGLLRSSDGFDPTILQPIVQVLQEPEARVLGSRVAGGVTQRLAARLLQQLLRTPPAPGSP

SEQ ID NO: 3746 - protein, 627 aa, Oryza sativa Japonica Group
MCSTTVWHSNSDNSGCCLLHQVALRAAEVVSKIGAFGLKVFLDEQRGQSSSAVRRARAVELRTILTRLGPTFVKIGQGLSTRPDLCPPEYLEELSELQDSLPTFPDEEAFACIERELGFPLDSIYSTISPSPIAAASLGQVYKARLKYSGQLVAVKVQRPGIEDIIGLDFYLLRGLGYLINKYVDFISSDVVALMDEFARRVYQELNYVQEGQNARRFKKLYADKQDVLVPDIFWDYTSAKVLTMEWIEGVKLNQQAAIEKQGLKVLDLVNIGIQCSLRQLLEYGYFHADPHPGNILATPEGKLAFLDFGMMSETPEDARVAIIGHVVHMVNRDYEAMARDYYALDFLEPDVDVSPIVPALKSFFDDALNSTVSELNFKTIVDGLGAVLYQYPFNVPAYYALILRSLTVLEGLALYADPNFKVLAASYPYFAKRLLTDPNPYLRDALIELLFKDGKFRQVYVLMKWNRLENLLVQGSQDREFAAKDALQPVLKLLLGPDGEELRVLVVKEAVRVTEAITFGTLIDSYNAAPEFLKPLISSGNPAGPFKISDTEREQMIELRDRVFRIWGLLRSSDGFDPTILQPIVQVLQEPEARVLGSRVAGGVTQRLAARLLQQLLRTPLAPGSP

SEQ ID NO: 3747 - protein, 704 aa, Populus trichocarpa
MMSFVAAGSQCFCSSSLALGPRPTSASRPKTRRAREARAAVVEARPPPAPARVIRPAVRDANLIVGGDRTEDLQAEARAMARAVNASVYSPEVLAVQYGSRPIKVLRRTLEILTGLGSFGLKLLLDKRNGVFDQKKGIRAAELRRIFTRLGPTFVKLGQGLSTRPDICPPEYLEELAELQDALPTFPDAEAFSCIERELGLPLDSIFSSISPSPIAAASLGQVYKAQLTYSGQTVAVKVQRPGIEEAIGLDFYLIRGLGFFINKYVDIITSDVVALIDEFARRVYQELNYVQEGQNARRFKKLYADREDILVPDIFWDYTSGKVLTMDWVDGVKLNEQDAIERQGLKVLDLVNTGIQCSLRQLLEYGYFHADPHPGNLLATPEGKLAFLDFGMMSETPEEARFAIIGHVVHMVNRDYEAMARDYYALDFLSRDVDVSPIVPALRNFFDDALNYTVSELNFKTLVNGLGAVFYQYPFNVPAYYALILRSLTVLEGLALYADPNFKVLAASYPYFAKRLLTDPNPYLRDALIELLFKDGRFRWNRLENLLVQGSKDRDFSANDALQPVLKLLLGPDGEQLQILVIKEAVRVTEAVVIGTVVDTYNSIPNVVRALIFNANVAGPLTVSDSEIDSMMALRDQVFRIWGLLRSSQDFDPALLQPILQVLQQPEARSLGERVIGGITQRLAARLLQQVLRAPTTVSTSIS

SEQ ID NO: 3748 - protein, 721 aa, Vitis vinifera
MSILPPGPLQSQCQDQSNNAISSWVYQWSSPPPWCGSRAIRISRPKGACKRRQAVISQAASVEALPALADGRGSTAIQVLRGARDRANDMQAEAKAMARAANASVYTPELVSNKYRSRPIKVLRRTMEILIGVGSFALKLVLDQSNGQLDQNKRIRAVDLRKICTKLGPTFVKIGQGLSTRPDLCPPEYLEELSQLQDALPTFPDAEAFSCIEKELGLPLDSIFSSISPSPIAAASLGQVYKAQLKYSGQVVAVKVQRPGIEEAIGLDFYLLRGLGFLINKYVDVISSDVVALIDEFARRVYQELNYVQEGQNARRFKKLYADKQDVLVPDIFWDYTSGKVLTMEWVDGVKLNEQAAIERQGLKVLDLVNTGIQCSLRQLLEYGYFHADPHPGNLLATPEGKLAFLDFGMMSETPEEARFAIIGHVVHMVNRDYEAMARDYYALDFLSPDVDVSPIVPALQNFFDGALNSTVSELNFKTIVDGLGAVLYQYPFNVPAYYALILRSLTVLEGLALYADPNFKVLAASYPYFAKRLLTDPNPYLRDALIELLFKDGRFRWNRLENLLVQGRKDRDFSAKDALQPVLKLLLAPDGEQLRILVIKEAVRVTEAVILGTVIDTYNSIPNPMRTLIVSGNTAGPLMMSDTEQENMIKLRDQVFRIWRLLRSSENFDPALLQPIVQVLQEPDARSFGGRVIGGITQRFAARLLQQVLRAPPTVPASTL

SEQ ID NO: 3749 - protein, 1011 aa, Sorghum bicolor; identical to SEQ ID NO: 1067

SEQ ID NO: 3750 - protein, 934 aa, Oryza sativa Japonica Group
MEEVALLGPESYDEEAAAAPGPEEEEGMRRVQEEDIIEAIEDAGFEAELLPDSTVSQPKLQNTLSGQFRIGGMTCAACVNSVEGILKKLPGVKRAVVALATSLGEVEYDPSVISKDEIVQAIEDAGFEAALLQSSEQDKVLLGLMGLHTEVDVDILHDILKKMEGLRQFNVNLVLSEAEIVFDPEVVGLRSIVDTIEMESSGRLKAHVQNPYIRAASNDAQEASKMLHLLCSSLFLSIPVFFIRMVCPRIHFTRSLLLMHLGPFYIGDLLKWILVSIVQFGVGKRFYVAAYRALRHGSTNMDVLVVLGTTASYVYSVCALLYGAFTGFHPPKYFETSAMIITFVLFGKYLEVLAKGRTSDAIKKLVELVPATALLLLKDKEGKYAAEKEIDASLIQPGDVLKVLPGSKVPADGTVVWGTSHVDESMVTGESAPISKEVSSIVIGGTMNLHGILHIQATKVGSGTVLSQIISLVETAQMSKAPIQKFADYVAGIFVPIVVTLSLVTFIAWFLCGSLGAYPNSWVDETSNCFVFSLMFSISVVVIACPCALGLATPTAVMVATGVGANHGVLVKGGDALERAQNVKYVIFDKTGTLTQGKATVTSTKVFSGIDLGDFLTLVASAEASSEHPLAKAILDYAFHFHFFGKLPSSKDDIKKRKQQILSQWLLEVAEFSALPGKGVQCLINGKKILVGNRTLITENGINIPEEAESFLVDLELNAKTGVLVAYDSELIGSIGMTDPLKREAVVVVEGLKKMGIYPVMVTGDNWRTAQAVAKEVGIEDVRAEVMPAGKADVVRSLQKDGSVVAMVGDGINDSPALAAADVGMAIGAGTDIAIEAADYVLVRNNLEDVITAIDLSRKTFSRIRWNYFFAMAYNIIAIPVAAGALFPFTGLQMPPWLAGACMAFSSVSVVCSSLWLRRYRKPRLTTLLQITVE

SEQ ID NO: 3751 - protein, 405 aa, Sorghum bicolor; identical to SEQ ID NO: 1068

SEQ ID NO: 3752 - protein, 404 aa, Zea mays
MDMAIDTPSPAPPTPPAPSAAAGRQTRAAEAVRLEHQLVRVPLESLRATVRSNHRLAEKEIAAVLSSASAAPAESSAAAVDHLTSLVSRLHGLKRKMEEGARAEELQVQRCRARLDRLATASTGDDAEWEDMRLKRILVDYMLRMSYYNSATKLAETSGIQDLVDIDVFLDAKRVIDSLQNNEVSPALAWCAENKSRLKKSKSKLEFLLRLQEFVEFVKVKNFIQAIAYARKHLAPWGSVHMKELQRVTATLVFRSNTNCTPYKILFEQDRWDYLVDIFKQDFCKLYGMTLEPLLNIYLQAGLTALKTPFCSEGSCPKEDPLSLEGFRKLAEPLPFSKQHHSKLVCYITKELMDTENPPQVLPNGYVYSEKALQEMSKKNDGKITCPRTGDVYDVSECVRAFIS

SEQ ID NO: 3753 - protein, 406 aa, Oryza sativa Japonica Group
MEMAIDTPSPSPSASSAAAGRQTRAAESVRLEHQLLRVPLEALKSTVRTNHRLAEKEIAAVLSSAAAAPGGGGGGSGDAAAVDHLTSLVSRLHGLKRKMEEGARAEELQVQRCRARLNRLASASSGDDAEWEELRLKRILVDYMLRMSYYDTAANLAETSGIQDLVDVDVFLDAKRVIDSLQNKEIAPALAWCAENRSRLKKSKSKLEFFLRLQEFVELVKAKNFMHAIAYARKYLSPWGATHMKELQRVTATLVFRSSTNCAPYKVLFEQNQWDSLVDQFKQEFCKLYGMTLEPLLNIYMQAGLTALKTPFCFDGNCPKEDPLSLPGFRKLAEPLPFSKQHHSKLVCYITKELMDTENPPLVFPNGYVYSTKALDEMAKKNGGKVTCPRTGDICNYTDLVKAYIS

SEQ ID NO: 3754 - protein, 408 aa, Hordeum vulgare subsp. vulgare
MEMAIDTPSPSPSVSPAPSAAAGRQTRAAESVRLEHQLVRVPLEALRATARTNHRLAEKEIAAVLSSASSASVAPGESGSAAAVEHLTSLVSRLHGLKRKMEEGARAEELQVQRCRARLDRLAAASAGDDAEWEDIRLKRILVDYMLRMSYYDTATKLAETSGIQDLVDIDVFLDAKRVIDSLRNKEIAPALAWCAENKSRLKKSKSKLEFLLRLQEFVELVKAKNFLQAISYARKYLAPWGSTHMKELQRVTATLVFRSTTNCVSYKVLFEQNQWDFLVDQFKQEFYKLYGMTLEPLLNIYLQAGLTALKTPFCFEGNCPKEDPLSLDGFRKLAEPLPFSKQHHSKLVCHITKELMDTENPPLVLPNGYVYSTKALDEMAKKNGGKITCPRTGEVCNYTELVKAYIS

SEQ ID NO: 3755 - protein, 391 aa, Zea mays; identical to SEQ ID NO: 1069

SEQ ID NO: 3756 - protein, 424 aa, Zea mays; identical to SEQ ID NO: 1079

SEQ ID NO: 3757 - protein, 360 aa, Sorghum bicolor
MSRPHLPKDPTFPRTNGSLDGGARGLGEIEEVGAAATVAVEQSPPSQSSSPSASSPPAAMSSCGQYMLHRVRKLDTLAGVAIKYGVEVADIKRLNGLSTDLQMFAHKTLRIPLPGRHPPSSYQENGSYESDDRECTPRRIHEDILDSILKTPKPKVSPAMSLLQGYYGLAPPPKRDQTSEGTEMAVYSKGKSAFLDVEPWLEPPNSDPFPLQNRKTRSLMIGSSLDGDTDENGDSERFIRRRQKADGELLPREENGGDFLASAGKGLALRPKSSNRPDMNKSQQNLFVMAEPLFVNGVQTVRKSSSTPEFQEPETNTSSSIWSASKWSINTDAFALPLPIPRFDNIPKPIAAWRNKAARD

SEQ ID NO: 3758 - protein, 359 aa, Zea mays
MIRPHLPKDPAFPRTNGSLDGGARGLGEIEEVGAAATVAVEQSPSQSSSPSASSPAAAMSSCGQYMLHRVRKLDTLAGVAIKYGVEVADIKRLNGLSTDLQMFAHKTLRIPLPGRHPPSSYQQNSSYESDDRECTPRRIHDDILESILKTPNSKVSPAMSLLQGYYGLEPPPKRDQTSEGTEMAVHSKGKSAFLDVEPWLEPPNSDPFPLQNRKNRSLMIGSFLDGGTDENGDSERFIRRRQKADGELLPREENGGDFLASVGKGLALRPKSSNRPDMNKSQQNLFAMAEPLFGNGLQTVRKSSSTPEFQEPETNTSSSIWSASKWSINTDAFALPLPIPRFDNIPKPIAAWRNKPARD

SEQ ID NO: 3759 - protein, 359 aa, Zea mays
  misc_feature (26)..(26): Xaa can be any naturally occurring amino acid
MIRPHLPKDPAFPRTNGSLDGGARGXGEIEEVGAAATVAVEQSPSQSSSPSASSPAAAMSSCGQYMLHRVRKLDTLAGVAIKYGVEVADIKRLNGLSTDLQMFAHKTLRIPLPGRHPPSSYQQNGSYESDDRECTPRRIHDDILESILKTPNSKVSPAMSLLQGYYGLEPPPKRDQTSEGTEMAVHSKGKSAFLDVEPWLEPPNSDPFPLQNRKNRSLMIGSFLDGGTDENGDSERFIRRRQKADGELLPREENGGDFLASVGKGLALRPKSSNRPDMNKSQQNLFAMAEPLFGNDLQTVRKSSSTPEFQEPETNTSSSIWSASKWSINTDAFALPLPIPRFDNIPKPIAAWRNKPARD

SEQ ID NO: 3760 - protein, 358 aa, Zea mays
MSRPHLPKDPAFPRTNGSLDGGARGRGEIEEVGAAATVDVEQSPLQSSSPSASSPPAAMSSCGQYMLHRVRKLDTLAGVAIKYGVEVADIKRLNGLSADLQMFAHKTLQIPLPGRHPPSSYQQNGSYESDDRECTPHRIHDDILDSILKTPKPKVSPAMSLLQGYYGLAPPPKRDQTSEGTEMAVYSKGKSAFLDVEPWLEPPNSDPFPLQNRKTKSLTIGSLDGDTDENGDSERFVRRRQKADGELLPREENGGDFLASAGKGLALRPKSSSRPDMNKSQQNLFAMAEPLFGSGVQTVRKSSSTPEFQEPETSTSSSIWSASKWSINTDAFALPLPIPRFDNIPKPIAAWRNKAARD

SEQ ID NO: 3761 - protein, 368 aa, Oryza sativa Japonica Group
MSRPHLPKDDHAFANGFLFDGVARRPGEIEEAAAFAAAADVAITIAAEQSGSPSSSTAPPMSSCGQYMLHRVGKLDTLAGIAIKYGVEVADIKRLNGLSTDLQMFAHKTLRIPLPGRHPPSTYQQNGSYEGDDRECTPPRRLHDDILDSVLRTPKHKASPAMSLLQGYYGLTPPPKKDTTHEGTEMAVYRKGKSVFLDDDPWFGEPPDSDPFPFQHRKTRSLAIGSSLLNGETEENGDSEKLIRRRQKADGELLPREENGSSAVLARAGKGLALRPKSGSRQDLNKSQQNLIALAEPSFGDGLHAVRKSSSTPEFQEPESNSSSTSSSIWSTSKWTLKPDAFTLPLPLPLFDNIPKPIAAWRNKAARD

SEQ ID NO: 3762 - protein, 463 aa, Sorghum bicolor; identical to SEQ ID NO: 1070

SEQ ID NO: 3763 - protein, 464 aa, Zea mays
MVNGEQRADAECTRASLLGRYEIGRTLGEGNFGKVKYARHIATGGHFAIKILDRSKILSLRIDDQIRREIGTLKLLKHPNVVRLHEVAASKTKIYMVLEFVNGGELFDKIAIKGKLSEHEGRRLFQQLIDGVSYCHDRGVYHRDLKPENVLVDRKGTIKISDFGLSALPQHLGSDGLLHTTCGSPNYIAPEVLQNRGYDGSLSDLWSCGVILYVMLVGCLPFDDRNLVVLYQKIFKGDCQIPKWLSPAAQDLLKRILQPNPMKRINVAGIREHEWFKKDYVPAVPHDDDEDVLPSPAPSIKEPIDEPAQEKCTPINAFQLIGMASSLDLSGFFEEEDAAQRKIRFTSTHPPKDLFDKIESVVMEMGFKVHRGAGKLKVLKNSKCSRNSRNPSSLLVCTEVFELGPSLYVVELRKSHGDSMLYRQLCERLSDELGACKTDQIARTESSSDDLSSLDGEAFPLSGF

SEQ ID NO: 3764 - protein, 460 aa, Zea mays
MVNGERRADAECTRASLLGRYEIGRTLGEGNFGKVKYARHIASGGHFAIKILDRSKILSLRIDDQIRREIGTLKLLKHPNVVRLHEVAASKTKIYMVLEFVNGGELFDKIAIKGKLSEHEGRRLFQQLIDGVSYCHDRGVYHRDLKPENVLVDRKGTIKISDFGLSALPQHLGSDGLLHTTCGSPNYIAPEVLQNRGYDGSLSDLWSCGVILYVMLVGCLPLDDRNLVVLYQKIFKGDCQIPKWLSPAAQDLLKRILQPNPMKRINVAGIREHEWFKKDYVPAVPHDDDEDVLPSPAPSIKPIDEPAQEKCSPINAFQLIGMASSLDLSGFFEEEDAAQRKIRFTSTHPPKDLFDKIESVVMEMGFKVHRGAGKLKVLKNSKCSRNPSSLLVCTEVFELGPSLYVVELRKSHGDSTLYRQLCERLSDELGACKTDQIARTESSSDDLSSVDGEAFPLSGF

SEQ ID NO: 3765 - protein, 461 aa, Oryza sativa Japonica Group
MVNGEAEAECTRASLLGRYEIGRTLGEGNFGKVKYARHLATGAHFAIKILDRNKILSLRFDDQIRREIGTLKLLKHPNVVRLHEVAASKTKIYMVLEYVNGGELFDKIAVKGKLSEHEGRRLFQQLIDAVSYCHDKGVYHRDLKPENVLVDRRGNIKISDFGLSALPQHLGNDGLLHTTCGSPNYIAPEVLQNRGYDGSLSDIWSCGVILYVMLVGYLPFDDRNLVVLYQKIFKGDTQIPKWLSPSARDLLRRILEPNPMKRINIAGIKEHEWFQKDYTPVVPYDDDDDNYLDSVLPIKEQIDEAKQEKPTHINAFQLIGMASALDLSGFFEEEDASQRKIRFTSTHSPKDLFDKIENVVTEMGFQVQRGNSKLKVMKNGRGSKNLRNPSSFLVCTEVVELGPSLYVVELKKSHGDPILYRQLCERLSDELGVCKTEQIQRTESLEDDLESFDSGSSLPGF

SEQ ID NO: 3766 - protein, 454 aa, Oryza sativa Japonica Group
MVKGGREALLGGYEMGRTLGEGNFGKVKYARHLATGGHFAVKILDRGRVVSLRAGDQIRREIATLKLLRHPHVVRLHEVAASKTKIYMVLEFVNGGELFERIAVKGKLSEKEGRRLFQQLIDGVSYCHDRGVYHRDLKPENVLVDQKGNIKISDFGLSALPQHLGNDGLLHTTCGSPNYIAPEVLQNKGYDGSLSDIWSCGVILYVMLIGYLPFDDRNIVVLYQKIFKGDTQIPKWLSHSAQNLLRRILEPNPMKRIDMAGIKSHEWFQKDYIPVLPYDDDDEDVQFGARLPAKEQINDEPGDKNSHQINAFQLIGMASSLDLSGFFEDEEVSQRRIRFTSTHPPKDAFDKIESSATELGFQVQRGHSKLKLMRNCKGSKNPESFMVSAEVFELGPSVNVVELRKSNGDPALYRQLCERISSDMGARNTEQIFATASLEDDLQNSNAGTPLFAL

SEQ ID NO: 3767 - protein, 466 aa, Oryza sativa Indica Group
MVKEGREALLGGYEMGRTLGEGNFGKVKYARHLATGGHFAVKILDRGRVVSLRAGDQIRREIATLKLLRHPHVVRLHEVAASKTKIYMVLEFVNGGELFQRIAVKGKLSEKEGRRLFQQLIDGVSYCHDRGVYHRDLKPENVLVDQKGNIKISDFGLSALPQHLGNDGLLHTTCGSPNYIAPEVLQNKGYDGSLSDIWSCGVILYVMLIGYLPFDDRNIVVLYQKIFKGDTQIPKWLSHSAQNLLRRILEPNPMKRIDMAGIKSHEWFQKDYIPILPYDDDDEDVQFGARLPAKEQINDEPGDKNSHQINAFQLIGMASSLDLSGFFEDEEVSQRRIRFTSTHPPKDAFDKIESSATELGFQVQRGHSKLKLMRNCKGSKNPESFMVSAEVFELGPSVNVVELRKSNGDPALYRQLCERISSDMGARNTEQIFATASLEDDLQNSNAGTPAVRFVTNAVFCKTAML

SEQ ID NO: 3768 - protein, 480 aa, Hordeum vulgare subsp. vulgare
MVATGDAEDAAAGCRARAALLGGYELGRTLGEGNFGKVKHARHRATGDHFAVKILDRGRVLSLRGADDQVRREIATLTMLAHPNVVRLHEVAASKTKIYMVLEFVNGGELFDRIAMKKKLSEREGRRLFQQLIDGVSYCHGKGVYHRDLKPENVLIDRKGNIKISDFGLSALPQHLGNDGLLHTTCGSPNYIAPEVLQNRGYDGSLSDIWSCGVILYIMLVGNLPFDDRNMVVLYQKIFKGDAQIPEWLSPSAQNLLRRILEPNPRKRINMAEIKIHEWFQKDYIPVAPYDDDDEDVRLGAILPIKQQISEAPGDKSTHQMNAFQLIGMASSLDLSGLFEEEGVSQRKIRFTSAQPPKDLFDKIEVSATQSGFHVQRAHSKLKITGNCNGPNNPTPFLVCAEVFELGPSLHVVELRKSHGDTAVYRQLCDRISSDLGIDKILGWGRSSTTTSRASTAEPRHHWLPCDECCVVGTPTDMML

SEQ ID NO: 3769 - protein, 409 aa, Zea mays; identical to SEQ ID NO: 1071

SEQ ID NO: 3770 - protein, 323 aa, Zea mays
MMEAKQAAPDRLSSLPAELQDEILIRLDLRDAVRTSALSRTWRDLWKSLSVISLSFPFGTHPSVVDSVLLRYIGPRVSLFRICVDDACADRIDDWLIALSRYRVESIDMCGTLRSLGNFNLYSSIFSLGDLVSLLLKNCRIPPLPVGFPGFPALQKLVLAYVIFPSNGFKQLEAIIRRSPLLHTLHMFDVFIPGEYPDSVIEAPNLRVLSIYSPYDYRWRFGELSCLEYANIHVFHCPQHEHDFGVFLARFAHVQKAVDVKMPYTLPFTFYNLKKLQLCVDFNEIHSILSMFTMLRSCHNLQNLKIEVRSNSGRCGSNIGSLE

SEQ ID NO: 3771 - protein, 409 aa, Sorghum bicolor
MEPKRVLAGPDRLSSLPAELRDEILVRLDLRDAVRTSVLSRTWRHLWKSLSVLSLSFPFGTHPSVVDSVLLPYIGPRVSLFDICVDDESAGRIDDWFAALSRCRVESIHMCGRLRSGYFNLHSSIFSFGDLVSLRLRCCNIPPLPVGFAGFPTLQELDLIFVVFPANGDKQLEAIIRRSPLLRTLDMFDVCISDDYPESVIEAPNLRILSIYSEYDYGWRFGELPCLEYANIDLLFCPQHERDFGDFLARFAHVQKLSLFSPADDVKMPYTLPFTFYNLKNLMLSMDFTEMRPILFMFTLLRSCDNLQKLEIESRDVFGQGFEADWEFLNALWTDGMCASLQIVQMSRVIWLPNEILLMKLILSKARLLRTLYVDTHPDDFDDPIIDLLKCKRASAQARVLFEGLAQQY

SEQ ID NO: 3772 - protein, 440 aa, Sorghum bicolor; identical to SEQ ID NO: 1072

SEQ ID NO: 3773 - protein, 433 aa, Zea mays
MAAAFSSTVGAPASTPTRSSFLGKKLNKPQVSAAVTYHGKSSSSNSRFKAMAAKEVDETKQTDEDRWKGLAYDISDDQQDITRGKGLVDNLFQAPMGDGTHVAVLSSYDYISQGQKSYNFDNMMDGFYIAKGFMDKLVVHLSKNFMTLPNIKVPLILGIWGGKGQGKSFQCELVFAKMGITPIMMSAGELESGNAGEPAKLIRQRYREASDLIKKGKMSCLFINDLDAGAGRMGGTTQYTVNNQMVNATLMNIADNPTNVQLPGMYNKEDNPRVPIIVTGNDFSTLYAPLIRDGRMEKFYWAPTREDRIGVCKGIFRTDGVDEEHVVQLVDTFPGQSIDFFGALRARVYDDEVRRWVSETGVENIARKLVNSKEGPPTFEQPKITIEKLLEYGHMLVAEQENVKRVQLADKYLNEAALGEANEDAMKTGSFFK

SEQ ID NO: 3774 - protein, 383 aa, Zea mays
MAAKEVDETKQTDEDRWKGLAYDISDDQQDITRGKGLVDNLFQAPMGDGTHVAVLSSYDYISQGQKSYNFDNMMDGFYIAKGFMDKLVVHLSKNFMTLPNIKVPLILGIWGGKGQGKSFQCELVFAKMGITPIMMSAGELESGNAGEPAKLIRQRYREASDLIKKGKMSCLFINDLDAGAGRMGGTTQYTVNNQMVNATLMNIADNPTNVQLPGMYNKEDNPRVPIIVTGNDFSTLYAPLIRDGRMEKFYWAPTREDRIGVCKGIFRTDGVDEEHVVQLVDTFPGQSIDFFGALRARVYDDEVRRWVSETGVENIARKLVNSKEGPPTFEQPKITIEKLLEYGHMLVAEQENVKRVQLADKYLNEAALGEANEDAMKTGSFFK

SEQ ID NO: 3775 - protein, 433 aa, Oryza sativa
MAAAFSSTVGAPASTPTNFLGKKLKKQVTSAVNYHGKSSNINRFKVMAKELDEGKQTDQDRWKGLAYDISDDQQDITRGKGFVDSLFQAPTGDGTHEAVLSSYEYLSQGLRTYDFDNTMGGFYIAPAFMDKLVVHISKNFMTLPNIKVPLILGIWGGKGQGKSFQCELVFAKMGINPIMMSAGELESGNAGEPAKLIRQRYREAADIIKKGKMCCLFINDLDAGAGRMGGTTQYTVNNQMVNATLMNIADNPTNVQLPGMYNKEDNPRVPIIVTGNDFSTLYAPLIRDGRMEKFYWAPTRDDRVGVCKGIFRTDNVPDEDIVKIVDSFPGQSIDFFGALRARVYDDEVRKWVSDTGVENIGKRLVNSREGPPEFEQPKMTIEKLMEYGYMLVKEQENVKRVQLAEQYLSEAALGDANSDAMKTGSFYGSAPSS

SEQ ID NO: 3776 - protein, 428 aa, Oryza sativa Japonica Group
MAAAFSSTVGAPASTPTNFLGKKLKKQVTSAVNYHGKSSNINRFKVMAKELDEGKQTDQDRWKGLAYDISDDQQDITRGKGFVDSLFQAPTGDGTHEAVLSSYEYLSQGLRTYDFDNTMGGFYIAPAFMDKLVVHISKNFMTLPNIKVPLILGIWGGKGQGKSFQCELVFAKMGINPIMMSAGELESGNAGEPAKLIRQRYREAADIIKKGKMCCLFINDLDAGAGRMGGTTQYTVNNQMVNATLMNIADNPTNVQLPGMYNKEDNPRVPIIVTGNDFSTLYAPLIRDGRMEKFYWAPTRDDRVGVCKGIFRTDNVPDEDIVKIVDSFPGQSIDFFGALRARVYDDEVRKWVSDTGVENIGKRLVNSREGPPEFEQPKMTIEKLMEYGYMLVKEQENVKRVQLAEQYLSEAALGDANSDAMKTGSFYG

SEQ ID NO: 3777 - protein, 466 aa, Oryza sativa (japonica cultivar-group)
MAAAFSSTVGAPASTPTNFLGKKLKKQVTSAVNYHGKSSNINRFKVMAKELDEGKQTDQDRWKGLAYDISDDQQDITRGKGFVDSLFQAPTGDGTHEAVLSSYEYLSQGLRTYDFDNTMGGFYIAPAFMDKLVVHISKNFMTLPNIKVPLILGIWGGKGQGKSFQCELVFAKMGINPIMMSAGELESGNAGEPAKLIRQRYREAADIIKKGKMCCLFINDLDAGAGRMGGTTQYTVNNQMVNATLMNIADNPTNVQLPGMYNKEDNPRVPIIVTGNDFSTLYAPLIRDGRMEKFYWAPTRDDRVGVCKGIFRTDNVPDEDIVKIVDSFPGQSIDFFGALRARVYDDEVRKWVSDTGVENIGKRLVNSREGPPEFEQPKMTIEKLMEYGYMLVKEQENVKRVQLAEQYLSEAALGDANSDAMKTGSFYGQGAQQAGNLPVPEGCTDPVAKNFDPTARSDDGSCLYTF

SEQ ID NO: 3778 - protein, 432 aa, Oryza sativa Japonica Group
MAAAFSSTVGAPASTPTNFLGKKLKKQVTSAVNYHGKSSNINRFKVMAKELDEGKQTDQDRWKGLAYDISDDQQDITRGKGFVDSLFQAPTGDGTHEAVLSSYEYLSQGLRTYDFDNTMGGFYIAPSFMDKLVVHISKNFMTLPNIKVPLILGIWGGKGQGKSFQCELVFAKMGINPIMMSAGELESGNGEPAKLIRQRYREAADIIKKGKMCCLFINDLDAGAGRMGGTTQYTVNNQMVNATLMNIADNPTNVQLPGMYNKEDNPRVPIIVTGNDFSTLYAPLIRDGRMEKFYWAPTRDDRVGVCKGIFRTDNVPDEDIVKIVDSFPGQSIDFFGALRARVYDDEVRKWVSDTGVENIGKRLVNSREGPPEFEQPKMTIEKLIEYGYMLVKEQENVKRVQLAEQYLSEAALGDANSDAMKTGSFYGSAPSS

SEQ ID NO: 3779 - protein, 432 aa, Triticum aestivum
MASAFSSTVGAPASTPTTFLGKKVKKQAGALNYYHGGNKINNRVVRAMAAKKELDEGKQTDADRWKGLAYDISDDQQDITRGKGIVDSLFQAPMGDGTHEAILSSYEYISQGLRKYDFDNTMDGLYIAPAFMDKLIVHLAKNFMTLPNIKVPLILGIWGGKGQGKSFQCELVFAKMGINPIMMSAGELESGNAGEPAKLIRQRYREAADIIKKGKMCCLFINDLDAGAGRMGGTTQYTVNNQMVNATLMNIADAPTNVQFPGMYNKEENPRVPIIVTGNDFSTLYAPLIRDGRMEKFYWAPTREDRIGVCKGIFRTDNVPDEAVVRLVDTFPGQSIDFFGALRARVYDDEVRKWVGEIGVENISKRLVNSREGPPTFDQPKMTIEKLMEYGHMLVQEQENVKRVQLADKYLSEAALGQANDDAMATGAFYGK

SEQ ID NO: 3780 - protein, 428 aa, Deschampsia antarctica
MAAAFSSTVGAPASTPTSFLGNKLKKQVTSAVNYHGKSFKANRFTVMAKDIDEGKQTDGDKWKGLAYDISDDQQDITRGKGIVDSLFQAPMGDGTHEAVLSSYEYVSQGLKKYDFDNTMGGFYIAPAFMDKLVVHLSKNFMTLPNIKIPLILGIWGGKGQGKSFQCELVFAKMGINPIMMSAGELESGNAGEPAKLIRQRYREAADMIKKGKMCCLFINDLDAGAGRMGGTTQYTVNNQMVNATLMNIADAPTNVQLPGMYNKEENPRVPIIVTGNDFSTLYAPLIRDGRMEKFYWAPTREDRIGVCKGIFQTDNVSDESVVKIVDTFPGQSIDFFGALRARVYDVEVRKWVSSTGIENIGKRLVNSRDGPVTFEQPKMTVEKLLEYGHMLVQEQDNVKRVQLADTYMSQAALGDANKDAMKTGSFYG

SEQ ID NO: 3781 - protein, 427 aa, Homo sapiens [sequence omitted]

SEQ ID NO: 3782 - protein, 362 aa, Sorghum bicolor
MGLDYYKILGVDKGATDDDLKKAYRKLAMKWHPDKNPNNKKEAENKFKQISEAYEVLSDPQKRAVYDQYGEEGLKGQVPPPGAGGAGPGGATFFSTGGDGPNVFRFNPRNAEDIFAEFFGGSSPFGGMGGGGMGGSGMGGGMPGMRTGGTRFSSSIFGDDIFGSAFGGGPDGYGMHTGGRPVKAPAIERKLPCSLEELYKGTTKKMKISREIADASGKTIPVEEILTIDVKPGWKKGTKITFPEKGNETPNTIPADLVFIIDEKPHPVFTRDGNDLVVTQKIPLAEALTGYTAHVTTLDGRSLTVPISSVIHPGYEEVVRGEGMPIPKDPSRKGNLRIKFDIKFPARLTSDQKAGVKRLLGQ

SEQ ID NO: 3783 - protein, 362 aa, Zea mays
MGLDYYKILGVDKGATDDDLKKAYRKLAMKWHPDKNPNNKKEAENKFKQISEAYEVLSDPQKRAVYDQYGEEGLKGQVPPPGAGGAGPGGATFFSTGGDGPTVFRFNPRNAEDIFAEFFGGSSPFGGMGGGGMGGSGMGGGMPGMRSGGTRFSSSIFGDDIFGSAFGGGPDGHGMHAGGRAVKAPAIERKLPCSLEELYKGTTKKMKISREISDASGKTIPVEEILTIDVKPGWKKGTKITFPEKGNETPNTIPADLVFIIDEKPHPVFTRDGNDLVVTQKIPLAEALTGYTAHVTTLDGRSLTVPISSVIHPGYEEVVRGEGMPIPKDPSRKGNLRIKFDIKFPARLTADQKSGVKRLLGQ

SEQ ID NO: 3784 - protein, 362 aa, Zea mays
MGLDYYKILGVDKGATDDDLKKAYRKLAMKWHPDKNPNNKKEAENKFKQISEAYEVLSDPQKRAVYDQYGEEGLKGQVPPPGAGGAGPGGATFFSTGGDGPTVFRFNPRNAEDIFAEFFGGSSPFGGMGGGGMGGSGMGGGMPGMRSGGTRFSSSIFGDDIFGSAFRSGPDGHGMHAGGRAVKAPAIERKLPCSLEELYKGTTKKMKISREISDASGKTIPVEEILTIDVKPGWKKGTKITFPEKGNETPNTIPADLVFIIDEKPHPVFTRDGNDLVVTQKIPLAEALTGYTAHVTTLDGRSLTVPISSVIHPGYEEVVRGEGMPIPKDPSRKGNLRIKFDIKFPARLTADQKSGVKRLLGQ

SEQ ID NO: 3785 - protein, 351 aa, Zea mays
MGLDYYKILGVDKGATDDDLKKAYRKLAMKWHPDKNPNNKKEAENKFKQISEAYDVLSDPQKRAVYDQYGEEGLKGQVPPPGAGGAGSTFFSTGGDGPTVFRFNPRNADDIFAEFFGGSSPFGGMGGSGMPGMRAGGSRFSSSIFGDDMFGSAFGGGGPDGHGMHTGGRAVKAPAIERKLPCSLEELYKGTTKKMKISREIADASGKTMPVEEILTIDVKPGWKKGTKITFPEKGNETPHTIPADLVFIIDEKPHPVFTRDGNDLVVTQKVPLAEALTGHTARLATLDGRILTVPISSVIHPGYEEVVRGEGMPVPKDPSRKGNLRIKFDIKFPARLSADQKSGVKRLLGQ

SEQ ID NO: 3786 - protein, 362 aa, Oryza sativa Japonica Group
MGMDYYKILGVDKAASDDDLKKAYRKLAMKWHPDKNPNNKKEAENKFKQISEAYEVLSDPQKRAVYDQYGEEGLKGQVPPPGAGGAGPGGATFFSTGGDGPNVFRFNPRNAEDIFAEFFGSSSPFGGMGGGMGGGMGGGPGMRTGGTRFSSSIFGDDIFGSAFGGGADGHHGMHGGGAGRALKAPAIERKLPCSLEELYKGTTKKMKISREIADASGKTIPVEEILTIDVKPGWKKGTKITFPEKGNEQPNVIPADLVFIIDEKPHPVFTRDGNDLVVTQKIPLAEALTGHTVHLTTLDGRSLTIPITSVINPGYEEVVRGEGMPIPKDPSKKGNLRVKFDIKFPARLTADQKSGVKRLLGQ

SEQ ID NO: 3787 - protein, 362 aa, Oryza sativa Indica Group
MGMDYYKILGVDKAASDDDLKKAYRKLAMKWHPDKNPNNKKEAENKFKQISEAYEVLSDPQKRAVYDQYGEEGLKGQVPPPGAGGTGPGGATFFSTGGDGPNVFRFNPRNAEDIFAEFFGSSSPFGGMGGGMGGGMGGGPGMRTGGTRFSSSIFGDDIFGSAFGGGADGHHGMHGGGAGRALKAPAIERKLPCSLEELYKGTTKKMKISREIADASGKTIPVEEILTIDVKPGWKKGTKITFPEKGNEQPNVIPADLVFIIDEKPHPVFTRDGNDLVVTQKIPLAEALTGHTVHLTTLDGRSLTIPITSVINPGYEEVVRGEGMPIPKDPSKKGNLRVKFDIKFPARLTADQKSGVKRLLGQ

SEQ ID NO: 3788 - protein, 342 aa, Vitis vinifera
MGVDYYKILQVDKSSKDEDLKKAYRKLAMKWHPDKNPNNKKEAEAKFKQISEAYEVLSDPQKRAVYDQYGEEGLKGQVPPPDAGVPGGATYFQTGDGPTMFRFNPRNANDIFAEFFGYSSPFGGMGGTGGGGMRGSRFSSGMFGDDIFSSFGDSRPMSQGPRKAPPIENTLPCSLEDLYKGTTKKMKISREIMDASGKTIPVEEILTIEIKPGWKKGTKITFPEKGNEQPNVIPADLVFIIDEKPHSKFTREGNDLVVTQKITLAEALTGYTVHLTTLDGRSLSIPINNAIHPNYEEVVPKEGMPIPKEPSKRGNLRIKFNIKFPTRLTAEQKSGIKKLLGS

SEQ ID NO: 3789 - protein, 349 aa, Glycine max
MGVDYYKILQVDRSAKDDDLKKAYRKLAMKWHPDKNPNNKKEAEAKFKQISEAYEVLSDPQKRAIYDQYGEEGLKGQVPPPDAGGAGTGTTFFSTGDIPGSFRFNPRNADDIFAEFFGFSSPFGGMGGRGGGGSGGGMRSRFPGGMFGDDMFASFGEGGGVHMSQGASRKAPPIESKLPCTLEEIYKGTTKKMKISREIADASGKTMPVEEILTINVKPGWKKGTKITFPEKGNEQPNVMPADLVFIIDEKPHGVFTRDGNDLVVTQKISLAEALTGYTVHLTTLDGRNLTIPINNVIHPTYEEVVPREGMPLPKDPSKKGNLRIKFNIKFPTRLTEEQKAGIRKLLNA

SEQ ID NO: 3790 - protein, 339 aa, Arabidopsis lyrata subsp. lyrata
MGVDYYKVLQVDRNASDDDLKKAYRKLAMKWHPDKNPNNKKDAEAMFKQISEAYEVLSDPQKKAVYDQYGEEGLKGNVPPPDAGGATYFSTGDGPTSFRFNPRNADDIFAEFFGFSSPFGGAGGRGGTRFSSSMFGDDIFASFSEGGGGGGGSMHHGGARKAAPIENKLPCSLEDLYKGTTKKMRISREIADVSGKTMQVEEILTIDVKPGWKKGTKITFPEKGNEQPGVIPADLVFIIDEKPHPVFTREGNDLVVTQKISLVEALTGYTVNLTTLDGRRLTIPVTNVIHPEYEEVVPKEGMPLQKDQTKKGNLRIKFNIKFPTRLTSEQKTGVKKLLG

SEQ ID NO: 3791 - protein, 342 aa, Ricinus communis
MGVDYYKILQVDKNAKDDDLKKAYRKLAMKWHPDKNPNNKKEAEAKFKQISEAYEVLSDPQKRAIYDQYGEEGLKGQVPPPDAGGPGGATFFSTGDGPTTFRFNPRNANDIFAEFFGFSSPFGGMGGGSGMRGGSARSFGGMFGDDIFSSFGDGRPMSSAPRKAPAIENTLPCTLEELYRGTTKKMKISREIADASGKTLPVEEILTIDIKPGWKKGTKITFPEKGNEQPNVIPADLVFIIDEKPHSTFTREGNDLVLTKKISLAEALTGYTVSLTSLDGRSLTIPINSVIHPDYEEVIPKEGMPIPKDPSKKGNLRIKFNIKFPTRLTAEQRSGIKKLLAP

SEQ ID NO: 3792 - protein, 230 aa, Sorghum bicolor
MAEDQPTPAASAAEEAAMDADTGGERLSAAALVGLLRRFLAVQQRRAEAYSTLRRGFSEYMANGGELAYQKLCGSITAEFNDCSKQVIEIISLLSMPEFSRSDLADLLKGVQAHEKEKLHLTAKIQVLKKAGRPSERLVNHEDCRSRSMAQHVCVHVKEITEAAGTEDAEADAEYDAALKEAIQGVQEAVTSINEHMEEVRYEIDGLEADTIGSKWSEVEEAFPGTLSIK

SEQ ID NO: 3793 - protein, 241 aa, Zea mays
MAEMEPSIGNHMAEDQPTPAASTVEEAAMDADTSGERRSAAALVGLLRGFLAVQQRRAEAYSTLRRGFSEYMAYGGELAYQQLCGNITAEFNDCSKQVLEIISLLSMPEFSRSDLADLLKGVQAHEKEKLHLTAKIQVLKKAGRPSERLVNHADCRSRSMAQHVCVHVKEITEAAGTEDAEADAEYDAALKEAIQGVQVAVSSINEHMEEVRYEIDGLEAETIGSKWSEVEEAFPGTLSIK

SEQ ID NO: 3794 - protein, 241 aa, Zea mays
MAEMEPSIGNHMAEDQPTPAASTAEEAAMDADTSGERRSAAALVGLLRGFLAVQQRRAEAYSTLRRGFSEYMAYGGELAYQQLCGNITAEFNDCSKQVLEIISLLSMPEFSRSDLADLLKGVQAHEKEKLHLTAKIQVLKKAGRPSERLVNHADCRSRSMAQHVCVHVKEITEAAGTEDAEADAEYDAALKEAIHGVQVAVSSINEHMEEVRYEIDGLEAETIGSKWSEVEEAFPGTLSIK

SEQ ID NO: 3795 - protein, 211 aa, Oryza sativa Japonica Group
MDCGGGGRSNARVAGVLRGFLAVQQRRAEAYSTLRRGFSEYMANGGELAFQQLCASVTAEFNDCSKQVLEMVALLSTPEICRGDLANLLKDVQAHEKEKLHLTARIQVLKKAGRPSERLVNHADCRSSNMAQHVCVHVKEITEAAGTEDAEADAEYDGALKEAIQGVQEAVTSINEHMEEVRYEIDALGAEIIGNNLAEVEEAFPDTLLIK

SEQ ID NO: 3796 - protein, 241 aa, Oryza sativa Japonica Group
MDPASVSASASGDPMAECPPAAAAAEGSDAMDCGGGGRSNARVAGVLRGFLAVQQRRAEAYSTLRRGFSEYMANGGELAFQQLCASVTAEFNDCSKQVLEMVALLSTPEICRGDLANLLKDVQAHEKEKLHLTARIQVLKKAGRPSERLVNHADCRSSNMAQHVCVHVKEITEAAGTEDAEADAEYDGALKEAIQGVQEAVTSINEHMEEVRYEIDALGAEIIGNNLAEVEEAFPDTLLIK

SEQ ID NO: 3797 - protein, 240 aa, Hordeum vulgare subsp. vulgare
MKEAQPKTGGQRNGDQMAEAKSTAGDVMDAAASSAGQRTAGVAGLLRGFLALQQRRAEAYSKLRRGFSEYMANGGECAYQQLCGNVTAEFNDCSTQILEMVSLFSKPNFCRGDLANLLKDVQACERDKLELTARIQVLKKAGRPSERLVNHEHCRSSSTSQHVCANLKEITEASGTEDAEADAEYDAALKEAIQSIQEAVTRINEHMEEVRYEIDALEADTVDSRLSEVEEAFPDALLIE

SEQ ID NO: 3798 - protein, 247 aa, Zea mays
MSKEKHHRDWILRRCCGSLAACILTLAAVVGFIVLVIFLALRPSKPSFYLQDVQLRSIDLSDPALSLDLQVTIASRNPNERVGVYYKTLDAFTTYRDEAVTVPVSMPAIYQGHKDVSVWSPVMSGDAVPVAQYVADAMKQDIEAGYVLLHVRVDGRVKWKVGSWVSGSYHLFVNCPALLATSGSAAVAAGGGVFAASAASGVVPAGVNTTVSLKFTHPADCPSTCESSLRYDDDRRALRSFVFVRTG

SEQ ID NO: 3799 - protein, 225 aa, Zea mays
MSKEKHHRDWILRRCCGSIAACILTLAAVVGFIVLVIFLALRPSKPSFYLQDVQLRSIDLSDPALSLDLQVTIASRNPNERVGVYYKTLDAFTTYRDEAVTVPVSMPAIYQGHKDVSVWSPVMSGDAVPVAQYVADAMKQDIEAGYVLLHVRVDGRVKWKVGSWVSGSYHLFVNCPALLATSGSAAVAAGGGVFAASAASGVVPAGVNTTVSLKFTHPADCTVDV

SEQ ID NO: 3800 - protein, 224 aa, Zea mays
MSKEKHHRDWILRRCCGSIAACILTLAAVVGFIVLVIFLALRPSKPSFYLQDVQLRSIDLSDPALSLDLQVTIASRNPNERVGVYYKTLDAFTTYRDEAVTVPVSMPAIYQGHKDVSVWSPVMSGDAVPVAQYVADAMKQDIEAGYVLLHVRVDGRVKWKVGSWVSGSYHLFVNCPALLATSGSAGAAGGGVFAASAASGVVPAGVNTTVSLKFTHPADCTVDV

SEQ ID NO: 3801 - protein, 216 aa, Hordeum vulgare subsp. vulgare
MSKGKVHHDWILRRCCGSIAACILTLAVLVGFVALVIYLALHPSKPSFYLQDIQLRSIDLSDPALSLDVQVTIASRNPNDRVGIYYKTLHAFTTYRDEPVTVPVSLPAIYQGHKDQSVWSPVMSGDSVPVAPYVADAMKQDIAAGYVLLHVKVDGRVKWKVGSWVSGGYHIFVNCPALLSASGGSVGGAFAMSATVGGKQTVSLKFTQPSYCTVDV

SEQ ID NO: 3802 - protein, 220 aa, Oryza sativa Japonica Group
MGKDKHHRDWILRRCCGSIAACILTLAVLVGFIVLVIYLAIHPSKPSFYLQDVQLRNIDLSDPAISLNLQVTIASRNPNDRVGVYYKTLHVFTTYREEPITVPVELPAIYQGHKDVSVWSPVMSGESVPVGQYVADAMRQDIAAGYVLLHVKVDGRVKWKVGSWVSGGYHLFVTCPALLAASGGNVGGAFAMSATAGGGAGGNATVSLKFAQAADCTVDV

SEQ ID NO: 3803 - protein, 355 aa, Sorghum bicolor
MSRTLVQPVGQKRLTNVAVVRLRKHGQRFEIACFPNKVLSWRSRVEKDIDEVLQSHTVYSNVSKGVLAKSKDLTKAFGTDDLTQICIEILEKGELQVSGKEREAQLSSQFRDIATIVMEKTINPETRRPYTITMIERLMHEIHFAVDPNLTSKEQALKVIKKLTEHFPIKRAPLRVRFTAPKPNFPGLMERIGEWNATVISKDELSTQPSIVCEIEPSLLHSCEERLKDVQGRVEVLSVSAHAESGPSVEQHDRVEVPQAALVKEPDAVAQISETMQKQSISTESQGNVQGKQQRRCKECDVLVEDKLYREHCKSGWHKHNYTRHKNGLPPLSQEECMVEMELADSKKDLKDYDF

SEQ ID NO: 3804 - protein, 355 aa, Zea mays
MSRTLVQPVGQKRLTNVAVVRLRKHGQRFEIACFPNKVLSWRSRVEKDIDEVLQSHTVYSNVSKGILANSKELAKAFGTDDLTQICIEILEKGELQVSGKEREAQLSSQFRDIATIVMEKTINPETRRPYTITMIERLMHEIHFAVDPNLTSKEQALKVIKKLTEHFPIKRAPLRVRFTAPKPNFPGLTEKIGGWNATIISKDELSTQPSIVCEIEPSLLRSCEERLKDVQGRVEVLSVSTHVESGPSVEQHNSVEVPHAAPVKEPDAVAQISETMQKQSISTESQGNAQGKQQRRCKECDVLVEDKLYREHCKSGWHKHNYTRHKNGLPPLSQEECMVEMELADSKKDLKDYDF

SEQ ID NO: 3805 - protein, 357 aa, Oryza sativa Japonica Group
MSRTLVQPVGQKRLTNVAVVRLRKHGQRFEIACFPNKVLSWRTRVEKDIDEVLQSHTVYSNVSKGVLAKSKDLLKAFSTDDHTAICLEILDKGELQVSGKEREAQLSSQFHEIATIVMDKTINPETRRPYTITMIERLMHDVHFAVDPNLTSKEQALKVIKKLTEHFPIKRAPLRVRFTAPKSKFASLTEKLEEWNANVISKDESGSQPSVVCEIEPSILRSCEERLKDVQGRVEVLSVSAHAEGGSSVDQYENTEESQSVPAVEIDPVARIGEAMQKQSISSEPENPGQGQGKQQRRCKECDVLVEDKLYREHCKSGWHKHNYTRHKNGLPPLSQEECLVEMELADSKRDLKDYDF

SEQ ID NO: 3806 - protein, 363 aa, Hordeum vulgare subsp. vulgare
MSRTLVQPVGQKRLTNVAVVRLRKGGQRFEIACFPNKVISWRERVEKDLDEVLQSHTVYSNVSKGVLAKSKDLIRTFGTDDLTEICLEILEKGELQVSGKEREAQLSSQFRDIATIVMEKTISTETRHPFTMKMIESIMHEIHFAVDPNLTSKEQALRVIKKLIENPKYKIKRAPLTVRFIAPKSNLAGLMEKLDGWNAIVLSKDESADQSSVVCEIEPSILHSCEEKLKDVQGRVEVLSVSARAEGGSSTDQYDNVEDNVEKAQAVPAKESGTVTQLSETMQKQSLSSEVESQGQAPGKPQKRCKECSIFMEDKLYRDHCKSGWHKHNYTRHKNGLPPLSQEECLMEMEMAESQRGLKDYDF

SEQ ID NO: 3807 - protein, 270 aa, Zea mays; identical to SEQ ID NO: 1073

SEQ ID NO: 3808 - protein, 277 aa, Zea mays
MLLNPASETSVLDTIRQHLLEEPAAAEARPADESFGSLVADQWSGSLPFRTDDADDMVVFGVLQDAFAYGWLPDGSFVHVKPEPVRSPDSSSYHPCSYDGSPCFGLLDPEPPLTPGTTTPGRGQEEAAAAMARGKHYRGVRQRPWGKFAAEIRDPARNGARVWLGTYDTAEDAALAYDRAAYRMRGSRALLNFPLRIGSGDKRPSPAPPEPTTSSDSSSSSASGSHKRRKRGEAAAANMAMALVPSPSQLNRPAQPWFPAAPVEQAAMAPRVEQIVV

SEQ ID NO: 3809 - protein, 293 aa, Sorghum bicolor
MLLNPASEALVLDTIRQHLLEEPAAAAAGDESFGSLVADQWSGSLPFRTDDADDMVVFGALQDAFAYGWLPDGSFAHVKPEPALSPDSHSYSYSYDGSSCCFGGLLLDPAEPLTPSSEAAATPRREAAAAAVARGKHYRGVRQRPWGKFAAEIRDPAKNGARVWLGTYDTAEDAALAYDRAAYRMRGSRALLNFPLRIGSEIAAAATAGDKRPSPEPATSSSDSSFSSCSSTTSSSSTSGSPKRRKRGEAAAANMAMALVPPPSQLNRPAQPWFPAAPVEQAAMAPRVEQLVI

SEQ ID NO: 3810 - protein, 277 aa, Zea mays
MLLNPASMLDTIRQHLLEEPPAAADESFGILVADQWSDSLPFRTDDADDMVVFGALQDAFAYGWLPDGSFAHVKPEPVRSPDSSYYSYDGSCFGGLPYPEQPLTPGSEGEAAATPSPRREEAAAAVARGKHYRGVRQRPWGKFAAEIRDPAKNGARVWLGTYDTAEDAALAYDRAAYRMRGSRALLNFPLRIASEIAAAAAGDKRPLALPEPATSSDSSSTGGSPKRRKRGEAAAANMAMALVPPPSQLSRPAQPWFPAAAPVEQAAMPPRVEQLVI

SEQ ID NO: 3811 - protein, 292 aa, Thinopyrum intermedium
MLLNPASEALVLDSIRQHLMEETAAVAAPAEARRQRPAYCRSTSFGSLVADQWSESLPFRADDSDDMVVYGALRDAFSCGWLPDGSFAAVKPEPLPSPDSYACDGPSCFGFLEPETPPATPPGEGEEATAFMGEAAAAVARGKHYRGVRQRPWGKFAAEIRDPAKNGARVWLGTYDTAEDAAVAYDRAAYRMRGSRALLNFPLRIGSEIAAAKAAAAAAGDKRPSPEPATSDSSSSSSGSPKRRKRGEAAAASMAMALVPPPSQLSRPAQAWYPAAPVEQVAMAPHVQQLVS

SEQ ID NO: 3812 - protein, 303 aa, Triticum aestivum
MLLNPASEALVLDSIRQHLMEDTAAAAAPVAEARRQRPAYCRSASFGSLVADQWSESLPFRADDSDDMVVYGALRDAFSCGWLPDGSFAAVKPEPLLPSPDSAYACDGPSCFGFLEPETPPATSPGEGEEEGAAFMGEAAAAVARGKHYRGVRQRPWGKFAAEIRDPAKNGARVWLGTYDTAEGAAVAYDRAAYRMRGSRALLDFPLRIGSEIAAAHAAAAHAAAAAAGDKRPSPEPATSDSSSSSSSSGSPKRRKRGEAAAASMAMALVPPPSQLSRPAHAWYPAAPVEQVAMAPRAQQLVS

SEQ ID NO: 3813 - protein, 318 aa, Oryza sativa Japonica Group
MTARSMLRNHPEASVLDTIRQHLLEEPRGGGGGEAAEASFGSLVADMWSDSLPFRDDDADDMVVFGAMRDAFSCGWLPDGVFAEVKPEPLLSPDSSSYDGSSCCFGFADVSEPVTPSDAASGAAEAAAAAAAATAEHGKEEEAAAAVARGKHYRGVRQRPWGKFAAEIRDPAKNGARVWLGTFDTAEDAALAYDRAAYRMRGSRALLNFPLRIGSEIAAAAAAAAAAAAGDKRPSPEPATSESSFSSSSSCTTTTTSSSTSSSGSPKRRKRGEAAAASMSMPLVPPPSQLNWPVQAWYPAAAPVEQVAITPRVEQLVI

SEQ ID NO: 3814 - protein, 317 aa, Oryza sativa Indica Group
MARSMLRNHPEASVLDTIRQHLLEEPRGGGGGEAAEASFGSLVADMWSDSLPFRDDDADDMVVFGAMRDAFSCGWLPDGVFAEVKPEPLLSPDSSSYDGSSCCFGFADVSEPVTPSDAASGAAEAAAAAAAATAEHGKEEEAAAAVARGKHYRGVRQRPWGKFAAEIRDPAKNGARVWLGTFDTAEDAALAYDRAAYRMRGSRALLNFPLRIGSEIAAAAAAAAAAAAGDKRPSPEPATSESSFSSSSSCTTTTTSSSTSSSGSPKRRKRGEAAAASMSMPLVPPPSQLNWPVQAWYPAAAPVEQVAITPRVEQLVI

SEQ ID NO: 3815 - protein, 319 aa, Oryza sativa Indica Group
MARSMLRNHPEASVLDTIRQHLLEEPRGGGGGGGEAAEASFGSLVADMWSDSLPFRDDDADDMVVFGAMRDAFSCGWLPDGVFAEVKPEPLLSPDSSSYDGSSCCFGFADVSEPVTPSDAASGAAEAAAAAAAATAEHGKEEEAAAAVARGKHYRGVRQRPWGKFAAEIRDPAKNGARVWLGTFDTAEDAALAYDRAAYRMRGSRALLNFPLRIGSEIAAAAAAAAAAAAGDKRPSPEPATSESSFSSSSSCTTTTTSSSTSSSGSPKRRKRGEAAAASMSMPLVPPPSQLNWPVQAWYPAAAPVEQVAITPRVEQLVI

SEQ ID NO: 3816 - protein, 293 aa, Hordeum vulgare subsp. vulgare
MLLNPASEALVLDSIRQHLMEDTAAAAPALAEARRQRPAYCRSASFGSLVADQWSESLPFRADDSDDMVVYGALRDAFSCGWLPDGSFAAVKPEPLPSPESCYGGFLYPDTPPATSAGDGEGDGEEEEAAALMGEAAAAAVARGKHYRGVRQRPWGKFAAEIRDPAKNGARVWLGTYDTAEDAAVAYDRAAYRMRGSRALLNFPLRIGSEIAAAHAAAAAAGDKRPSPEPATSDSSSSSGSPKRRKRGEAAAASMAMALVPPPSQLSRPAQAWYPAAPAEQVAMAPRVQQLVS

SEQ ID NO: 3817 - protein, 196 aa, Sorghum bicolor
MSKYGTIPTTSSTPPPGASSSSSSPLDFISRAKARGASALATRRPWRELADPRALSVPRGFSAAYRRARANLAHFAANYALVVLLVVFVSLLWRPVSMLVFLACFAAWLVLYFLRDRDADGALVVCGRGVGDGVVIAVLSAVTLVLLLLTGATGFILTSLLVGLLLVLLHALLHRPADSIDDEAGRWYTPVPPSSY

SEQ ID NO: 3818 - protein, 192 aa, Zea mays
MSKYGTIPTTSSTPAPEGSSQLDFISRAKARGASALATRRPWRELADPRALSVPRGFSDAYRRARANLAHFAANYALVVLLVVFVSLLWRPVSMLVFLACFAAWLVLYFLRDRDVDGTLVICGRGVGDGVVVAVLSAVTLALLLLTGATGFILTSLLVRLLLVLLHALLHRPADSIDDEAGRWYTPVPPSNY

SEQ ID NO: 3819 - protein, 190 aa, Hordeum vulgare subsp. vulgare
MSKYGTIPISSSSDAPPPGSSPLDFISRAKARGASALATRQPWRELADPKAIALPRGLGDAYLRARANLAHFSMNYAIVVLGVVFLSLLWHPFSLIVFLACMVAWVFLYFLRDVPLALFGHTIGDGVVLAVLSAVTLILLLLTGATGNILTSLLVGLVLVLLHALLHRPADSIDEEAGRWYTPVTPPPPY

SEQ ID NO: 3820 - protein, 193 aa, Oryza sativa Japonica Group
MSKYGTIPTSSSSDGPPPGSSSSSPLDFISRAKARGATALAERRPWRELADPRAASVPRGLGGAYRRARANLGHFSMNYAIVVLAVVFLSLLWHPVSLIVFLACMVAWLFLYFLRDEPLALCGRAVGEGAVLAVLSVLTLVLLLLTGATVNILTSLLVGVVIVLLHAVFHRPADSIDEEAGRYYTPVPPQPSY

SEQ ID NO: 3821 - protein, 647 aa, Sorghum bicolor
MPEAPVTTMREAATAAAAAAVPETHRELLEYIERVTAGAAQVQRRVLAEILAQNAPAEYLRRLGVAGDAPGAVDAFRRAAPLVTYEDILPDVLRIANGDTSPILSGKPIREFLTSSGTSGGERKLMPAIADEMDRRSLLYSLLMPVMSQAVPGLDKGKCMYLYFVKAESRTPGGHPARPVLTSFYRSRHFLERPHDPYTVYTSPDEAILCVDAYQSMYAQLLCGLVHRADVLRVGAVFASGFLRAIRFLEKHWQRLCRDIRTGTLDAEAVTDRAVRAAVEQRVLLRADPALADAVEAECARTSWQGIIRRVWPNTKYIDVIVTGAMAQYIPQLEFYGGGLPLTCTMYASSESYFGINLNPMCKPSEVAYTLIPTMCYFEFLPLPQPGDDDAGEPDQRDLVDLVDVKLGHEYELVVTTYSGLYRYRVGDVLRVAGFKNQAPMFNFLRRKNVVLSIDADKTDEAELHAAVSGAVQHLAPFGASLVEYTSYADAGTIPGHYVLFWELRLRAAAAAGATPTPVPASVFEDCCLAVEEALNSVYRQGRAADRSIGPLEIRVVSDGTFDKLMDYALARGASINQYKAPRCVRPGPVVELLDGRVQASYFSPKCPKWSPGVGKQWSSDAAAAAKKAAAGGSNGGGGGGGAVVVA

SEQ ID NO: 3822 - protein, 629 aa, Oryza sativa Japonica Group
MPEAVAAAVSPAAAAATAMCAEHREKLEHIERVTRNAGQEQRRVLEEILAQNAQAEYLRRLGVPGDAPGADEAFRRLAPLVTYEDILPDVLRIANGDTSPILSGKPVSEFLTSSGTSGGERKLMPTIEEEMERRSGLYSLLMPVMSRQVPGLDKGKAMYLYFVKSEWRTPGGLPARPVLTSFYRSRYFLERPHDPYTVYTSPDEAVLCEDAYQSMYAQLICGLVHRADVLRVGAVFASGFLRAIRFLEKHWPSLCRDIRAGELDGGVTDPAVRGAVGRVLRGADPALADAIEAECARPSWQGIIRRVWPSTKYIDVIVTGAMAQYIPTLEFYGGGLPLACTMYASSECYFGLNLNPMCKPSEVAYTLIPTMCYFEFLPVNSGANDVAAPEPDHRGLVDLVDVKLGHEYELVVTTYSGLYRYRVGDVLRVAGFKNAAPMFAFVRRKNVALSIDSDKTDEAELHAAVTEAVQHLAPFGASLVEYTSYADTATTIPGHYVLFWELRSPAGGTPVPASVFEDCCLAVEEGLNSVYRQCRAADRSIGPLEIRVVADGTFDKLMDYALSRGASINQYKAPRCVRPGPVVELLDGRVQATYFSPKCPKWCAGGNKQWISSGAAAKKTTTTCDSLAV

SEQ ID NO: 3823 - protein, 610 aa, Sorghum bicolor
MPEAPTTKTTLPAGGFGPGAHREALEFIEHVTANAGKVQRRVLAEILTQNAPAEYLRRYGVPGGSADAVEAFRRVVPLVTYEGLQPDILRIASGDTSPILSGKPISEFLTSSGTSGGERKLMPTIADELDRRSLLYSLQMPVMSQSVPGLDKGKAMYLLFVKAESRTPGGLVARPVLTSYYRSRQFLERPHDPYTEYTSPNEAILCVDSYQSMYTQLLCGLVHRADVLRVGAVFASGFLRAVRFLEKHWPRLCRDIRTGTLDPEITDRAVRDAVVGRVLRGANPALADEIEAECAGPSWEGIIRRLWPRTKYIDVIVTGAMSQYIPTLEFYGGGLPLACTMYASSECYFGLNLKPMCKPGDVAYTLIPTMCYFEFLPLQCSDGKAEPSHRDLVGLVDVKLGHEYELVVTTYSGLYRYRVGDVLRVAGFKNEAPMFKFIRRQNVALSIDSDKTDETELHAAVSGAVQHLAPFGASLVEYTSYADAATIPGHYVLFWELRAGSTAVPASVFEDCCLSVEEALNSVYRQCRACDKSIGPLEIRVVSEGTFDKLMDYAISRGASINQYKAPRCVRPGPVVELLDARVQAKYFSPKCPKWSPGNKQWNAASNGDA

SEQ ID NO: 3824 - protein, 610 aa, Oryza sativa Japonica Group
MPEAPTAKTAPAYGYAPGAHAEALEFIEHVTANAGQVQRRVLGEILAQNAPAEYLRRYGIPGSPDVVDAFRRLVPLVTYEGLQPDILRIANGDTSPIFSGKPISEFLTSSGTSGGERKLMPTIADEMNRRSLLYSLLMPVMSQSVSGLDKGKAMYLLFVKAESRTPGGLAARPVLTSYYRSRQFLDRPRDPYTSYTSPDEAILCVDSYQSMYAQLLCGLVHRADVLRVGAVFASGFLRAIHFLEKHWARLCHDIRTGELDPEITDRVVRDAVGRVLRADPALADAIEDECARASWEGIIRRLWPRTKYIDVIVTGTMSQYIPTLEFYGGGLPLTCTMYASSECYFGLNLNPMCKPSDVAYTLIPTMCYYEFLPVNCNNATAEASHRDLVDLVDVKLGHEYELVVTTYSGLYRYRVGDVLRVAGFKNKAPMFSFVRRQNVALSVDSDKTDETELHAAVSGAVQHLAPFGASLVEYTSYADAATIPGHYVLFWELRAGSTAVPASVFEECCLSVEEALNSVYRQGRACDRSIGPLEIRVVAEGTFDKLMDYAISRGASINQYKAPRCVRPGPVVELLDARVQGKYFSPKCPKWSPGNKQWNKSKDLVGKGDA

SEQ ID NO: 3825 - protein, 547 aa, Zea mays
MSTSHARVKSDSNNGRTRTCDDGGSSGTSGGERKLMPAIADEMDRRSLLYSLLMPVMSQAVPGLDRGRCMYLYFVKAESRTPGGHPARPVLTSFYRSRHFLERPHDPYTVHTSPDEAVLCVDAYQSMYAQLLCGLVHRADVLRVGAVFASGFLRAIRFLEKHWQRLCRDLRRGALGAEVTDRSVRAAVARVLRADPALADAVEAECARPSWQGIIRRVWPGTKYIDVIVTGAMAQYIPTLEFYGGGLPLTCTMYASSESYFGINLNPMCKPSEVAYTLIPTMCYFEFLPLPQPGPGGTDDADPDHRDLVDLVDVKLGHEYELVVTTYSGLYRYRVGDVLRVAGFKNQAPMFKFLRRKNVVLSIDSDKTDEAELHAAVSGAVQHLAPFGASLVEYTSYADAGTIPGHYVLFWELRLRAGDVPVPVPASVFEDCCLAVEEALNSVYRQGRAADRSIGPLEIRVVSDGTFDRLMDYALARGASINQYKVPRCVHPGPVVELLDGRVQASYVSPKCPKWSPGGGKQWSSDAAAKKPAAAAGSNNGGGAVVA

SEQ ID NO: 3826 - protein, 595 aa, Zea mays
MASSSSTTATTSCCPLLLALLWVLMAAHRGHAAAVFTGLVFESPGEAEAFEDALLRQACFNVSFFLSAGGRREACVSRLDTARGGAGSGPVPVLRAALRDTLGEAVGAAGAVRGLASLSNHAREEVALRDCVELLGYSVDELGWALDAMAADDTDDGGGLELLDSPGRRSASSRAENDIHAWLSAALGNQDTCVAGFHGTDGRLLRRVEAAVAQLTQLVSNLLAMHKRLRSITPLRHGPPKSNSASSGAGDDELPPWVMDVEDEEELVAKRARRAGRTSSTRVDVVVAQDGSGRYRTVSEAVARAPSHSKRKYVIYVKRGEYHENVEVRKKKTNIVIVGEGMGETVISGSRSFSSGWTTFRSATFAVSGAGFIARDLTFRNTAGPAAHQAVALRVDSDRSAFFRVAVEGHQDTLYAHSLRQFYRDCRIAGTVDFVFGNGIVVVQRSLVATLPLAPGQTGSVTAQGRKDPNQNTGFSFHGCVLEAKYPTYLGRPWKPFSRVVVMESYLGSGIQARGWLEWAAAGSGDHSPGLATLFYGEYRNYGPGAGVAGRVKWPGYHVIMDAAVASRFTVRRFIDGLAWLPGTGITFTADLFRR

SEQ ID NO: 3827 - protein, 597 aa, Sorghum bicolor
MASSTSATSCPCLLLTLLVLLLLMVMARRADASAVFAGLSFESPGEAEAFEDALLRQACVNVSFLSGGRDREACVSRLDTARGGAGSGPVPVLRAALRDTLGEAVGAVRAVRGLASLSNRPREEMAVRDCVELLGYSVDELGWALDAMAETDTETDASGGGSAARRAEDDLHAWLSAALGNQDTCVEGFHGTDGRLLHRVEAAVAQLTQLVSNLLAMHKRLRSITPLLHHGPPTNKNNGTSGGGAGDELPPWVMDIEVDDGDKQDQDEEELVAKRARAGRVSTRVDVVVAQDGSGRYRTVSEAVARAPNHSKRKYVIYVKRGVYHENVEVRKKKTNIVIVGEGMGETVISGSRSFSSGWTTFRSATFAVAGAGFVARDLTFRNTAGPAAHQAVALRVDSDRSAFFRVAVEGHQDTLYAHSLRQLYRDCRVAGTVDFVFGNGIVVVQRSLVATLPLAPGQTGSVTAQGRKDPNQNTGFSFHGCVVEGKYPTYLGRPWKPFSRVVVMESYLGPGIQARGWLEWAAAGSGDHSTGLATLFYGEYKNYGPGAGVAGRVKWPGYHVIMDAAVASRFTVRRFIDGLAWLPGTGITFTADLFRK

SEQ ID NO: 3828 - protein, 593 aa, Hordeum vulgare subsp. vulgare
MAWTWTTRGKGTRLQVLVLLLLLALLLVARGGDGAAVFSGYTFRGQGEAEAFEEALLRQACFNVSSSSSGAGRGKGDCVSRIDTARGGPSSGPVPVLRAALRDTLDEAVSAVGAVAGLASLSNHAREEMAVRDCIELLGYSVDELGWSLDAMAEPFDGAEAEMETEHGAAPGSVGSGARAEDDMHAWLSSALGNQDTCTEGFHGTDGRLLRRVEASVAQLTQLVSNLLAMHKRLRSIMPLRQRGKNDTAASGAGSELPPWVMDVAGGVEEELARARGRSGGKKAMHVDVVVARDGSGRYRSVGEAVARAPNHSRKKYVIYVKRGVYYENVDVKKKKTNIVLVGEGMGETVITGSRSFSSGWTTFRSATVAVSGAGFIARDLTIRNTAGPAAHQAVALRVDSDRSAFFRVAIEGHQDTLYAHSLRQFYRDCRVSGTVDFVFGNGIAVIQRTTLATLPLAPGQTGSVTAQGRKDPNQNTGFAIHNCVVEAKYPTYLGRPWKPFSRVVVMESYLGAGVRARGWLEWAGDAGLATLFYGEYRNFGPGAGVAGRVKWPGYHVIMDPAWATHFTVRRFINGLTWLPSTGVTFTADLIKK

SEQ ID NO: 3829 - protein, 611 aa, Oryza sativa Japonica Group
MASTGALLLLLLFVLACGGNGGAAAAVFSGCSFESQEEAEAFEAALLQQACFNVTAFGGGGGGGGGEGGCVSRLDTARGGAGSGPVPVLRAAVRDTLGEAVGAVAAVAGLASLSNHAREEMAVRDCVELVGYSVDELGWALDAMADPDGGVAAAEEEDETEPETRRRRRRGARAEDDIHAWLSAAMGNQGTCLDGFHGTDSRLLRRVESAVTQLTQLVSNLLAMHKKLRDITPQHQHQHHHHPGNNNNKNGTADGAAAGGDDTGPSSDLPPWVTDVVNDVEEEVTATRGRGRSSSSGRKAMRVDVVVAQDGSGRWRTVSEAVARAPSHSRRRYVIYVKRGVYEENVEVRKKKTNIVIVGEGMGETVITGSRSMAAGWTTFRSATFAVSGAGFIARDMTIRNTAGPAAHQAVALRVDSDRSAFFRIAVEGHQDTLYAHSLRQFYRDCRVSGTVDFIFGNGIAVIQRTTISTLPPAAGQNAGSVTAQGRRDPNQNTGFALHACIVEAKYPTYLGRPWKPFSRVVVMESYLGAGVQPRGWLEWDGDGGELATLFYGEYRNYGPGANIGGRVRWPGYHVIMDAAVAVRFTVRRFIDGLAWLPSTGVTFTADLNRK

SEQ ID NO: 3830 - protein, 251 aa, Sorghum bicolor
MASPKMLPLLLLATSLLLSCGLLVSADYAPMTLTVVNNCPYPVWPGIQANSGHDVLEGGGFFLPALSHKSFPAPAHPWSGRIWARTGCTGAGAQLHCATGDCGGRLQCGGLGGAAPATLAQVNLHHGNDQTSYGVSVVDGFNVGLSVTPHEGRGNCPVLACRRNLTETCPGELQLRSPAGSVLACKSGCEAFRTDELCCRNMYNSPRTCRASKYSEFFKRECPQAFTYAHDSPSLTHECAAPRELKVIFCH

SEQ ID NO: 3831 - protein, 248 aa, Zea mays
MASPKPLLLLATSFLSCGLLVAADYAPMTLTVVNNCPYPVWPGIQANSGHDVLEGGGFFLPPLSHKSFPAPAHPWSGRIWARTGCAGAGAQLHCATGDCGGRLQCGGLGGAAPATLAQVNLHHGNDQTSYGVSVVDGFNVGLSVTPHEGRGNCPVLACRKNLTETCPGELQLRSPAGSVLACKSGCEAFRTDELCCRNMYNSPHTCRASKYSEFFKRECPQAFTYAHDSPSLTHECAAPRELKVIFCH

SEQ ID NO: 3832 - protein, 247 aa, Oryza sativa Indica Group
MGLDQAASLVATSLLSCGVILADYAPMTLTIVNNCPYPVWPGIQANSGHDVLEGGGFFLPALSHRSFAAPAHPWSGRIWARTGCTGAGAQLHCTTGDCGGRLQCAGLGGAAPATLAQVSLHHGNDQTSYGVSVVDGFNVGLSVTPHEGRGNCPVLACRKNLTETCPSELQLRTPAGSVVACKSGCEAFRTDELCCRNMYNSPRTCRSSKYSEFFKRECPQAFTYVHDSPSLTHECAAPRELKVIFCH

SEQ ID NO: 3833 - protein, 247 aa, Oryza sativa Japonica Group
MASAKLLLLVATSLLSCGVILADYAPMTLTIVNNCPYPVWPGIQANSGHDVLEGGGFFLPALSHRSFAAPAHPWSGRIWARTGCTGAGAQLHCATGDCGGRLQCAGLGGAAPATLAQVSLHHGNDQTSYGVSVVDGFNVGLSVTPHEGRGNCPVLACRKNLTETCPSELQLRTPAGSVVACKSGCEAFRTDELCCRNMYNSPRTCRSSKYSEFFKRECPQAFTYAHDSPSLTHECAAPRELKVIFCH

SEQ ID NO: 3834 - protein, 247 aa, Oryza sativa Indica Group
MASAKLLLLVATSLLSCGVILADYAPMTLTIVNNCPYPVWPGIQANSGHDVLEGGGFFLPALSHRSFAAPAHPWSGRIWARTGCTGAGAQLHCATGDCGGRLQCAGLGGAAPATLAQVSLHHGNDQTSYGVSVVDGFNVGLPVTPHEGRGNCPVLACRKNLTETCPSELQLRTPAGSVVACKSGCEAFRTDELCCRNMYNSPRTCRSSKYSEFFKRECPQAFTYAHDSPSLTHECAAPRELKVIFCH

SEQ ID NO: 3835 - protein, 250 aa, Hordeum vulgare subsp. vulgare
MGMASPKLLLLLATFLPSCGLLLADFAPMTLTVVNNCPYPVWPGIQGSAGSEVLEGGGFYLPSLSHRSFPAPAHAWSGRIWARTGCTPAGGEQLRCATGDCGGRLQCGGLGGAAPATLAQVSLHHGNDQSSYGVSVVDGFNVGLSVTPHEGRGNCPVLACRKDLTQTCPGELQVRQGGGAVVACRSGCLALGSDELCCRNAYNSPAACRPSKYSDFFKSACPQAFTYAHDSPSLTHECSAPRELKVIFCH

SEQ ID NO: 3836 - protein, 402 aa, Zea mays; identical to SEQ ID NO: 1074

SEQ ID NO: 3837 - protein, 402 aa, Zea mays
MAPGSIASRWRELQGADSWSGLLDPLDIDLRANLIAYGELTQATYDGFNQERRSPHAGACVFGYSDLLAGSGAAAAGSYAVTRFIYATSALPGVPEAFLLLPLPDLLPESWSRESNWMGYVAVATDDGVAALGRRDILVAWRGTMRGLEWVNDFDFTPVSAAPVLGPAAAANPFALVHRGFLSVYTSSNPDSKYNQTSARDQVLAEVSRLVALYKDEVTSITVCGHSLGASLATLNAVDLAANGVNAPPAGSSQPPCPVTALVFASPRVGDGNFKRAIASFPDLRALHVKNAGDIVPTYPPLGYVDVAVQLPIATGRSPYLRQPGTIATLHNLECYLHGVAGEQGSAGGFRLEVDRDVALVNKGEDALKDQYPVPAQWWVAKNKCMVKGADGHYALQDFEQI

SEQ ID NO: 3838 - protein, 361 aa, Sorghum bicolor
MTTPGSIASRWRELQGADSWSGLLDPLDLDLRTNIITYGELTQATYDGFNQEQRSPHAGACVFGYSNLLTSSGAAAAGNYTVATDDGVAALGRRDILVAWRGTMRSLEWVNDFDFTPVSAAPVLGSAAAANPAALVHRGFLSVYTSSNPDSKYNQTSARDQVLAEVSRLMALYKDEVTSITVTGHSLGASLATLNAVDLAANGVNAPPAGSAQPACPVTAFVFASPRVGDGNFKRAFASFPDLRALHVKNAGDVVPTYPPLGYVDVAVQLPIATGRSPYLKQPGTILTLHNLECYLHGVAGEQGSAGGFKLEVDRDVALANKGEDALKNQYPVPVSWWVAKNNFMVKGTDGHWALQDFEQI

SEQ ID NO: 3839 - protein, 427 aa, Zea mays
MLLLVAFFTHFLVSSLSSAEAGPPSSSATATRWRELQGNNSWNGLLDPLDMDLRRSIISYGELVQATYDGFNRERRSPHAGACLYGRADLLPGVGVAAAGRYAVTRFVYATSALPVPGSDFPLLPLPETREAWTRESNWIGYVAVATDEGAAELGRRDVVVAWRGTVKDLEWANDFTFTPVSAAPVLGSAAAANPLAVVHQGFLSVYTSSNADSRFNKASARDQVLEEVRRLMELYKGEATSITVVGHSLGAALATLNAVDIAANGLNEGSGSSQQLPCPVTAILFACPHVGDRFFRAAFVGYFRDLRALHVRNAGDVVPVVPPLAYVDVAVAVLPIDTSRSPYLRSPGPAGTLHNLECYLHGVAGEQGSAAGGFRLEVDRDVALVNKGADALRDEYPVPANWWVPENRWMVRGSDGHWVLKDFEEI

SEQ ID NO: 3840 - protein, 408 aa, Sorghum bicolor
MASSGNGSIAAGIAKRWRELHGDNSWKGLMDPLDLDLRKTIISYGELAEATYDGFNTERRSPHAGACIYGYSDLLASSGVAAAGHYEVTRFIYATSGQPLPDAFLVRPLAALKDVWSRESNFMGYVAVATDEGAAALGRRDIVVAWRGTVQSLEWVNDLTFTPVPAAPVLGKKAAANPLAMVHMGFLSLYTSSHAGSKFNKTSARDQVFEEVRRLVELYKDEELSITITGHSLGAAISILNAVDIVSNGVNVPAGGGGSAACPVTAFVFACPHVGDRFFRAAFHSFRDLRALHVKNAGDVVPMYPPLAYVDVAVTLNINTGRSPYLKWPGTVLTLHNLECYLHGVAGEQGSAGGFKLEVKRDVALVNKGADALKDEYPVPASWWALENKGMVKDDADGLLKLNDFQQI

SEQ ID NO: 3841 - protein, 407 aa, Oryza sativa Japonica Group
MSSSPMLGGIADRWRELHGQDSWNGLLDPLDLDLRSSILSYGELVQATYDSFNRERRSPHAGACVYGHGDLLAAAGASAAGSYAVTKFVYATSGLPVPEAFLLLPLPSLLPPAWSRESNWMGYVAVATDEGVAALGRRDIVVAWRGTVESLEWVNDFDFTPVPAAPVLGAAAAANPRAIVHRGFLSVYTSSNKDSKYNKASARDQVLEEVRRLMELYKDEVTSITVVGHSLGASLATLNAVDIVANGANCPPASSSSSQPPCPVTAIVFASPRVGDGFFKAAFASFPDLRALHVKNAGDVVPMYPPLGYVDVAVKLRISTSRSPYLRSPGTIETLHNLECYLHGVAGEQGSAGGFKLEVDRDVALANKGVDALKDKYPVPPRWWVSKNRCMVKDADGHWALHDFEQI

SEQ ID NO: 3842 - protein, 423 aa, Sorghum bicolor
MPGSIASRWRELHGKDSWKGLLDPLDIDLRASVISYGELAQATYDGFNTEPRSPHAGACVYGLADLLTASGGAGGAAAAGGSNRYRVTKFVYATSGLQVPDAFLLLPQPGLQGQEPAWCRESNWMGYVAVATDEGAAELGRRDVVVAWRGTVRSLEWVNDLDFTPVPAAPVLGAAADTHPRAMVHRGFLSLYTSSNASSKYNKLSARDQVLEEIRRLMELYKHEETSITITGHSLGASLATLNAVDIVANGLNSPAAAAGGHSSSSSSAQPAPVTAIVFASPHVGGPFFKAAFASFGEQLRALHVKNQGDVVPLYPPLGYVDVAVPLPIHTARSPWLRQPGTPQTLHNLECYLHGVAGEQGGGGADDGGGFRLEVDRDVALVNKAADALRDEYPVPVKWRVALNKGMVRGADGRWVLKDFEHV

SEQ ID NO: 3843 - protein, 535 aa, Zea mays; identical to SEQ ID NO: 1075

SEQ ID NO: 3844 - protein, 589 aa, Sorghum bicolor
MALDLAVGGSAARRAETQTLAPVLLMGPPPPPPIPPTTGVYLPGPPPPGALLSRPIPMALPREVIVYMDECRSRSLLKFISDAGIVPSLEDERRRERVVRELGKIVMEWAKRVAYEQGKQHWITSATVLTFGSYALGDPHAEGGAGQGSGPGLHMKKVHSFWNPRSSCTMLAWATAYGVAVWVKSGFWAFSRACVVEAPIDNASGKAIPWDQAYGPESDIDVLCIGPYIATLQHHFFVVLRQMLEGRPEVSELQSIEGAKVPLMRFKFNGILVDFPYVQLPFINAAEAMHAFDPHVLENVDGPSWRCLSGVRANRQIIQLVPNMKLLGFFAGIHLAILAAYVCRRHPNASINTLLSLFFDIFAHWPWPLPVSLLDPPVLCRGPDGCSLMPIMLPCNPPEFCSSSTTESTFSKIKEELRRGYALTKDTRSTDFDWSWLFASFPYGARYKCFLRIVLSAPLDEELRDWVGWVKSRFRNLLLKLESLGVYCDPDSSEQVDHTITEPNVVFFWGLVFTRNIQICTSSLKEDFMKSVCNNIYGKEKCAHSDITMAIVGPPQLPKSIFDLSVYSEKLPQHMMGHQLMKQRYNAVS

SEQ ID NO: 3845 - protein, 340 aa, Sorghum bicolor; identical to SEQ ID NO: 1015

SEQ ID NO: 3846 - protein, 456 aa, Zea mays
MERLIAGLLGFLLVASVGSHAARAPDQYWKSALPNTPMPTSLSQLLDAAPAGGGTTVNVGWGGVHVDAGHGKPGGTTVDVGKGGVGVNVNPGRSGKPGGTTVGVGKGGVGVNVNPGYGKPGGTTVGVGKGGVGVNVNPGKPGGTTVGVGKGGVGVNVNPGKPAGGAGTTVGVGKGGVGVGVNPGHGKPGGTTVGVGKGGVGVHVNPGKKPVHVNVSPFIYTYAASETQLHDDPSVALFFQETDLRPGKKMTVQFASTGTTGTKFLPRSEAEAIPFSSQKVPEILARLSVDPDSVEAAEMAQTLRDCEAPAAKGEKKACATSLESMVDFATASLGTRHVRAVSTVVAKEGSPKQEYTVTGVERAAGGTDDDGRVVACHAEPYAYAVFACHLTPQTRAYSVSMLGRDGTAVDAVAVCHADTSGWNPKHVAFQVLNVKPGTVPVCHFLPQDHVVWTRSG

SEQ ID NO: 3847 - protein, 502 aa, Sorghum bicolor
MERLIAGLLGFLLIASVGSHAARAPDQYWKSALPDTPMPTSLSQLLNTPAGGTTVNVGWGGVHVDAGHGKPGGTTVDVGKGGVGVNVNPGSSGRKPGGTTVGVGGKGGVGVKVNPGYGKPGGTTVGVGKGGVGVNVNPGYGKPGGTTVGVGKGGVGVNVNPGKPGGTTVGVGKGGVGVDVNPGYGKPGGTTVGVGKGGVGVNVNPAKPGGTGTTVGVGKGGVGVGVNPGYGKPGGTTVGVGKGGVGVHVNNPRKKPVNVNAGPFQYLYAASETQLHDDPSVALFFQEKDLQQPGKKVTVQFANTATAGAKFLPRSDAEAIPFSSEKVPEILSRFSVDPDSVEAAEMAQTLRDCEAPAAKGEKKACATSLESMVDFATTSLGTSHVRAVSTVVAKEGSPKQEYTVTGVKPAAGTGHDGRLVACHAEPYAYAVFACHLTQQTRAYSVSMLGRDGTAVDAVAVCHADTSGWNPKHIAFQVLKVKPGTVPVCHFLPQDHVVWTRSG

SEQ ID NO: 3848 - protein, 429 aa, Oryza sativa Japonica Group
MDRLLACLLGFLLIASVGSHAARTPEQYWKSALPNSPIPSSLSQLLSTAGGGTSVNVGGGGVHVDAGHGKPGGTTVDVGKGGVGVNVKPGYGKPGGTTVGVGKGGVGVNVKPGYGKPGGTSVGVGKGGVGVNVQPGYGKPGGTTVGVGKGGVGVNVQPGYGKPGGTTVGVGKGGVGVNVKPRGKPVHVNVAPFIYNYAATETQLHDDPNVALFFLEKDLHPGKTMAVHFTATTAGEKFLPRSEADAMPFSSEKVPEILSRFSVKPGSVEAAEMAQTLRDCEAPPAQGERKACATSLESMVDFATSSLGTSHVRAASTVVGKEGSPEQEYTVTAVKRAAAGGDQDQLVACHAEPYAYAVFACHLTRATRAYAVSMAGRDGTGVEAVAVCHADTAGWNPKHVAFQVLKVKPGTVPVCHFLPQDHVVWTRSG

SEQ ID NO: 3849 - protein, 429 aa, Oryza sativa Japonica Group
MDRLLACLLGFLLIASVGSHAARTPEQYWKSALPNSPIPSSLSQLLSTAGGGTSVNVGGGGVHVDAGHGKPGGTTVDVGKGGVGVNVKPGYGKPGGTTVGVGKGGVGVNVKPGYGKPGGTSVGVGKGGVGVNVQPGYGKPGGTTVGVGKGGVGVNVQPGYGKPGGTTVGVGKGGVGVNVKPRGKPVHVNVAPFIYNYAATETQLHDDPNVALFFLEKDLHPGKTMAVHFTATTAGEKFLPRSEADAMPFSSEKVPEILSRFSVKPGSVEAAEMAQTLRDCEAPPAQGKRKACATSLESMVDFATSSLGTSHVRAASTVVGKEGSPEQEYTVTAVKRAAAGGDQDQLVACHAEPYAYAVFACHLTRATRAYAVSMAGRDGTGVEAVAVCHADTAGWNPKHVAFQVLKVKPGTVPVCHFLPQDHVVWTRSG

SEQ ID NO: 3850 - protein, 429 aa, Oryza sativa Indica Group
MDRLLACLLGFLLIASVGSHAARTPEQYWKSALPNAPIPSSLSQLLSTAGGGTSVNVGGGGVHVDAGHGKPGGTTVDVGKGGVGVNVKPGYGKPGGTTVGVGKGGVGVNVKPGYGKPGGTSVGVGKGGVGVNVQPGYGKPGGTTVGVGKGGVGVNVQPGYGKPGGTTVGVGKGGVGVNVKPRGKPVHVNVAPFIYNYAATETQLHDDPNVALFFLEKDLHPGKTMAVHFTAATAGEKFLPRREADAMPFSSEKVPEILSRFSVKPGSVEAAEMAQTLRDCEAPPAQGERKACATSLESMVDFATSSLGTSHVRAASTVVGKEGSPEQEYTVTAVKRTAAGGDQDQLVACHAEPYAYAVFACHLTRATRAYAVSMAGRDGTGVEAVAVCHADTAGWNPKHVAFQVLKVKPGTVPVCHFLPQDHVVWTRSG

SEQ ID NO: 3851 - protein, 536 aa, Hordeum vulgare subsp. vulgare
MDRLVAAGILAFLLIASVGSHAARAPGQYWESALPNTPMPSSLSQLLDTQAGGTSVNVGSGGVHVDAGHGMPGGTTVDVGKGGVGVNVKPGSAKPGGTTVGVGKGGVGVNVKPGYGKPGGTTVGVGKGGVDVNVKPGSAKPSGTGTTVGVGKGGVDVNVKPGSGKPSGTGTTVGVGKGGVDVNVKPGYGKPGGSGTTVGVGKGGVGVNVRPGGGTTVGVGKGGVGVNVKPGYGKPAGGTGTTVGVGKGGVGVNVKPGYGKPGGTTVGVGKGGVGVNVRPGYGKPGGKPRGKPVHVNVSPFIYNYAATETQLHDDPSAALFFLEKDLHAGKKMSVHFMATPGAGGKFLPRSEADAIPFSSEKAPEILSRFSVAPDSAEAAEMKQTLRECEAAAGKGEKKSCATSLESMVDFATSSLGTSHVRAVSTVVGNGKEGSPEQEYTMTGVKRAAGADQLVACHAEPYAYAVFACHLTQATRAYTVSMVGRDGTAVEAVAVCHADTAGWNPGHVAFQVLKVKPGGAPVCHFLPQDHVVWTRRG

SEQ ID NO: 3852 - protein, 497 aa, Zea mays
MASPPPPPAAAAAPAAAASGPPPPAQVVGNAFVHQYYNILHQSPELVYRFYQESSRLGRPSGTGDDGMETVTSMDAINDKIVSMGIDRAEIKAVDAQESLCGGVTVLVMGHLTGRNSVSREFVQSFFLAPQEKGYFVLNDILRYVGEEGGDEGGEQQPATEVAADVVAADVEAATPASILANGTVGGDTVTVPQDASPQPECQVAEPALNPKEEVLNREVVCNPPNDVNPIVEETPVPEVINEVPNNVGVAPPISSPSAPPEEAPKKSYASIVKVMKEYRPPAPAVPSRPAPPKTEKQSSPAPALVADAPAFTPNPQSGSFQDPEVDAHATYVRSLPLNATPQQLEEEFKRFGAIKHDGIQVRSNKIQGFCYGFVEFEDASAVQTAIEASPVTIGERQCYVEEKRTTGGSRGGSRGGRFPPVRGGNFRGEGIRGRGTYNGGRGYGRGEFNYRSDYGGRGGGRGGSSRGDVGYQRVDHSSAASGRGARAPSAATAVAK

SEQ ID NO: 3853 - protein, 488 aa, Zea mays
MASQPPPPAAAAASGAPPPAQVVGNAFVHQYYNILHQSPELVYRFYQEASCLGRPAGTGADGMDTVTTMDAINDKIVSMGIDRAKIKAVDAQESLCGGVSVLVMGHLTGRNSVSRQFVQSFFLAPQEKGYFVLNDILRYVGEGGGDEGAEKQPAPEVAADAEKTTSAPILANGTVGGDATTVPQDASPQPECQVAEPALNPKEEVLNGEVCNSLSDVEKPVAEETPVPDVINEVPNNVAVAPPISSPPVPLKEAPKKSYASIVKVMKEHRPLAPAVPSRPAPPITEKQASPAPTPVTEAPAFSPNPQSGGFQDPEVDAHAIYVRSLPLNATPQQLEEEFKRFGTIKHEGIQVRSNKIQGFCYGFVEFEDASAVQAAIEASPVTIGERQCFVEEKRTTGSRGGGSRGGRFPPGRGGNFRGEGIRGRGTYNGGRGYGRGEFSYRSDYGGRGGGRGGSLHGGDVGYQRVDYSGTSSGRGARAPSAAAAMAK

SEQ ID NO: 3854 - protein, 266 aa, Sorghum bicolor
MATCSSTVVALGALLFSLLATCGSCARPVSFNASDFTADPDWEAARATWYGAPTGAGPDDDGGACGFKNVNLPPFSAMTSCGNEPLFKDGKGCGSCYQIRCQNNDACSGNPETVIITDMNYYPVSKYHFDLSGTAFGAMAKPGRSDELRHAGIIDIQFKRVPCNYPGQKVTFHVEEGSNPVYFAVLVEFEDGDGDVVQVDLMEANSGSWTPMRESWGSIWRLDSGHRLTAPFSLRITNESGKTLVANQVIPANWVPNTYYRSIVQY

SEQ ID NO: 3855 - protein, 268 aa, Zea mays
MATTLSSTVVVALGAPLFLLLVTCGSCARPVSFNASDLTADPGWDAARATWYGAPTGAGPDDDGGACGFKNVNLPPFSAMTSCGNEPLFKDGKGCGSCYQIRCQNHPACSGNPETVIITDMNYYPVAKYHFDLSGTAFGAMAKPGRNDELRHAGIIDIQFKRVPCNYPGQKVTFHVEEGSNPVYFAVLVEFEDGDGDAVQVDLMEANSASWTPMRESWGSIWRLDSGHRLTAPFSLRITNESGKTLVADHVIPANWVPNTYYRSIVQY

SEQ ID NO: 3856 - protein, 266 aa, Sorghum bicolor
MATTFSSKAVAFAAIFSFLVTYGSCARPVSFNASDFTADPNWEAARATWYGAPTGAGPDDDGGACGFKNVNLPPFSAMTSCGNEPLFKDGKGCGSCYQIRCQNHAACSGNPETVIITDMNYYPVAKYHFDLSGTAFGAMAKPGRSDELRHAGIIDIQFKRVPCNYPGQKVTFHVEEGSNSVYLAVLVEFEDGDGDVVQVDLMEANSGYWTPMRESWGSIWRLDSNHRLQAPFSLRITNESGRTLVANQVIPANWVPNTYYRSIIQY

SEQ ID NO: 3857 - protein, 270 aa, Zea mays
MAATSSSSSSTVVALAALLFLLLVTCGSCARPASFNASDFTADPNWEAARATWYGAPTGAGPDDDGGACGFKNVNLPPFSAMTSCGNEPLFKDGKGCGSCYQIRCQNHPACSGNPETVIITDMNYYPVAKYHFDLSGTAFGAMAKPGRTDELRHAGIIDIQFKRVPCNYPGQKVTFHIEEGSNPVYLAVLVEFEDGDGDVVQVDLMEANSGSWTPMRESWGSIWRLDSGHRLAAPFSLRITNESGKTLVANQVIPANWVPNTYYRSIIQY

SEQ ID NO: 3858 - protein, 268 aa, Sorghum bicolor
MASSFSKVVAALIGALIFSLLVTYGSCATPANFTASDFTADPNWEAARATWYGAPTGAGPDDNGGACGFKNVNLPPFSAMTSCGNQPLFKDGKGCGSCYQIRCQKHPACSGNPETVIITDMNYYPVSKYHFDLSGTAFGAMAKPGRNNELRHAGIIDIQFKRVPCNYPGQKVTFHVEEGSNPVYFAVLVEFEDGDGDVVQVDIMEANSGYWTPMRESWGSIWRLDANHRLQAPFSLRITNESGRKLVANRVIPANWAPNNYYRSIIQY

SEQ ID NO: 3859 - protein, 260 aa, Sorghum bicolor
VALALGALLFLLLATCGSCAIPASFNVSDFTADPNWEAARATWYGAPTGAGPDDNGGACGFKNVNLPPFSAMTSCGNEPLFKDGKGCGSCYQIRCQQHPACSGNPETVIITDMNYYPVAKYHFDLSGTAFGAMAKPGRNDELRHAGIIDIQFKRVPCYYPGQKVTFHVEVGSNPVYFAVLVEFEDGDGDVVQVDLMEANSGSWTPMRESWGSIWRLDSDHRLTAPFSLRITNESGKTLVANQVIPANWTPNTYYRSMVQY

SEQ ID NO: 3860 - protein, 268 aa, Oryza sativa Japonica Group
MAFSISKKAAVAALFSFLVVTCVAGARPGNFSASDFTADPNWEVARATWYGAPTGAGPDDDGGACGFKNTNQYPFSSMTSCGNEPIFKDGKGCGSCYQIRCVNHPACSGNPETVIITDMNYYPVSKYHFDLSGTAFGAMAKPGQNDQLRHAGIIDIQFKRVPCNFPGLKVTFHVEEGSNPVYFAVLVEYEDGDGDVVQVDLMEANSQSWTPMRESWGSIWRLDSNHRLTAPFSLRITNESGKQLVASQVIPANWAPMAVYRSFVQYSS

SEQ ID NO: 3861 - protein, 318 aa, Sorghum bicolor
MSAQCKLVALGALIFFLLVSYGSCTRIVNFNASHITADPYWVAARATWYGAPTGAGPYDNGGACGFKNVNLPPFSAMTSCGNQPLFKDGKGCGSCYQIRCVNHPACSGNPETVMITDMNYYPVAKYHFDLSGTAFGAMAQPGRNNELRHAGIIDIQFRRVPCIYPGQTVTFHIEHGSNPNYLAVLVEFEDGDGDVVQVDIMEANSGWWTPMRESWGSIWRMDSKRRLQGPFSLRITNESGERLVAYQVIPANWAPNTYYRSNIQYEAFGSAAGQAIGFGSAVGLVISSAAGLHTVITGIIGLICLVLYHLHGIEVPQF

SEQ ID NO: 3862 - protein, 264 aa, Triticum aestivum
MAPLSSKAVALVALFSLLVTYAAGAGNFNDSAFTADPNWEDARATWYGAPTGAGPDDDGGACGFKNTNQYPFSSMTSCGNEPIFKDGKGCGSCYQIRCTNDQSCSGNPETVVITDMNYYPVAKYHFDLSGTAFGAMAKPGLSEKLRHSGIIDIQFKRVPCEFPGLKVTFHVEQGSNPVYFAVLVEYEDGDGDVVQVDLMEANSGTWTPMRESWGSIWRLDSGHRLQAPFSMRITNESGKSLVADKVIPANWAPSTFYRSIVQYS

SEQ ID NO: 3863 - protein, 264 aa, Triticum aestivum
MAPLSSKAVALVALFSLLVTYAAGAGNFNDSAFTADPNWEDARATWYGAPTGAGPDDEGGACGFKNTNQYPFSSMTSCGNEPIFKDGKGCGSCYQIRCTNDQSCSGNPETVVITDMNYYPVAKYHFDLSGTAFGAMAKPGLSEKLRHSGIIDIQFKRVPCEFPGLKVTFHVEQGSNPVYFAVLVEYEDGDGDVVQVDLMEANSGTWTPMRESWGSIWRLDSGHRLQAPFSMRITNESGKTLVADKVIPANWAPSTFYRSIVQYS

SEQ ID NO: 3864 - protein, 460 aa, Zea mays; identical to SEQ ID NO: 1076

SEQ ID NO: 3865 - protein, 541 aa, Sorghum bicolor
MEDLLYYSLTILICIAVIPLLSTLRRPSTATVTPPPLPPGPSTLLSLITPLLFLGRTNFGIERVLTAARSRYGPIFTLHLLPSRPAIFIADHAVARRALVQRGAAFADRPPAGLALRLFSSGQRNITSAAYGPLWRVLRHNLTGKLFHPSRLARFAAARRKALRGLVAAVVARQQMMVGGPDGGDGVAVVVVVVEGLLHRAMFHVLVAMCFGDRLATDDVVAAVEALQREFLTSVLGFQVFDVCPGVTTRLFRRRWEQMLSLRRRQEELFAPLIRACRAQRDAAAAGDDDGDGTTYVDTLLDLRIPEDGGRNLTEGEMVSLCAEFVAVGTDNTATEAQWIMANLVTQPEIQARLRAEIHQVTGGGGSACIQEEDLPRMPYLRAVVLEGLRRHPPGHFAIPHAATGGIDDGGDGGLSLEGFRVPRRASVNFPLVALGLDEAVWPDPLRFRPERFLAGGEGADVDLTGAKEVKMIPFGAGRRICPGMALALLHLELFVAGLVAEFEWVQVAGEPVEFAEKQELSVVMRRPLRAHVVRCTRNAS

SEQ ID NO: 3866 - protein, 520 aa, Zea mays
MEDLLYYSLTVAICIAVIGLLSILRSFTATGPPPALPPGPSLLSLITPLLFLGRTNFGIERILSAARSRYGPVFTLYLLPSRPAIFIADHVVAHRVLVQGGAAFADRPPASLPFRLFSSGQRNITSGAYGPVWRALRHNLTGNVFHPSRMGRFAAARRRALRGLVAGVARDAGSRAVVVEGLLHRAMFHVLVTMCFGERLATDAVVASVEALQREFLKSVLGFQVFDVCPALTSLLFRRRWKQMLSLRRRQEELFAPLIRACRAQRGSDANAGADTYVDTLLDLRIPEDGGRNLTEGEMVSLCAEFVAVGTDNTATEAQWIMANLVAHPEIQARLRAEIHQVTGGAGVQEQDLPRMPYLRAVVLEGLRRHPPGHFAIPHAATGIQDDDGGGDHATIEGFRVPRRASLNFTLVALGLDEAVWPDPLRFRPERFLPGGEGADVDLTGAKEVKMIPFGAGRRICPGMALALLHLEFFVASLVAEFEWLQVPGEPVEFAEKQELSVVMRRPLRATVVRCTRNAN

SEQ ID NO: 3867 - protein, 220 aa, Sorghum bicolor
MAGRRAEEEYDYLFKVVLIGDSGVGKSNLLSRFTRNEFCLESKSTIGVEFATRTLHVEGKIIKAQIWDTAGQERYRAITSAYYRGALGAVLVYDVSKPTTFENISRWLKELRDHADSNIRIMLVGNKTDLRHLRAVATDDAQSFAEAEGLSYIETSALEATNVEEAFQLILGDIYRAISKKPVASDESGQGAAGGVKEGKTINVATGGDAAAEKKQCCSA

SEQ ID NO: 3868 - protein, 219 aa, Zea mays
MAGRRAEEEYDYLFKVVLIGDSGVGKSNLLSRFTRNEFCLESKSTIGVEFATRTLHVEGKIIKAQIWDTAGQERYRAITSAYYRGALGAVLVYDVSKPTTFENISRWLKELRDHADSNTRIMLVGNKTDLRHLRAVATDDARSFAEAEGLSYIETSALEATNVEEAFQLILGDIYRAVSKKPVASDEVGAGQGGVKEGKTIDVATGADAAAHKKQCCSA

SEQ ID NO: 3869 - protein, 220 aa, Oryza sativa Japonica Group
MAGTRRAEEEYDYLFKVVLIGDSGVGKSNLLSRFTRNEFCLESKSTIGVEFATRTLHVEGKIIKAQIWDTAGQERYRAITSAYYRGALGAVLVYDVSKPTTFDNISRWLKELRDHADANIRIMLVGNKTDLKHLRAVATDDAHKFAEAEGLSYIETSALEATNVEEAFQLILGDIYRAISKKPVASDEGGAGAAGGVKEGKTINVAAGDANSEKKQCCST

SEQ ID NO: 3870 - protein, 225 aa, Hordeum vulgare subsp. vulgare
MAGGGGGRSGRGEEEYDYLFKVVLIGDSGVGKSNLLSRFTRNEFCLESKSTIGVEFATRTLHVEGKIIKAQIWDTAGQERYRAITSAYYRGALGAVLVYDVTKPTTFENISRWLKELRDHADANIRIMLVGNKTDLKHLRAVTTDDAGSYAEAEGLSYIETSALEAMNVEEAFQLILGDIYRTISKKAVASEEDRAAAAGVKEGKTINVAATASDGGEKKQCCSA

SEQ ID NO: 3871 - protein, 217 aa, Arabidopsis lyrata subsp. lyrata
MARRPDEEYDYLFKVVLIGDSGVGKSNLLSRFTRNEFCLESKSTIGVEFATRTLQVEGRTVKAQIWDTAGQERYRAITSAYYRGALGALLVYDVTKPTTFENVSRWLKELRDHADSNIVIMLIGNKTDLKHLRAVATEDAQSYAEKEGLSFIETSALEALNVEKAFQTILSEIYRIISKKSISSDQTTANASIKEGQTIDVAATSESTAKKPCCSSS

SEQ ID NO: 3872 - protein, 217 aa, Arabidopsis thaliana
MARRPDEEYDYLFKVVLIGDSGVGKSNLLSRFTRNEFCLESKSTIGVEFATRTLQVEGRTVKAQIWDTAGQERYRAITSAYYRGALGALLVYDVTKPTTFENVSRWLKELRDHADSNIVIMLIGNKTDLKHLRAVATEDAQSYAEKEGLSFIETSALEALNVEKAFQTILSEVYRIISKKSISSDQTTANANIKEGQTIDVAATSESNAKKPCCSSS

SEQ ID NO: 3873 - protein, 215 aa, Vitis vinifera
MARRPDEEYDYLFKVVLIGDSGVGKSNLLSRFTRNEFCLESKSTIGVEFATRTLQVEGRTVKAQIWDTAGQERYRAITSAYYRGALGALLVYDVTKPTTFENVSRWLKELRDHADSNIVIMLIGNKTDLKHLRAVATEDAQGFAEKEGLSFIETSALEATNVEKAFQTILGEIYRIISKKTLSSDDPAPAGIKEGKTLVVDGSDTNTKKTCCSSF

SEQ ID NO: 3874 - protein, 217 aa, Zea mays
MARRPEEEYDYLFKVVLIGDSGVGKSNLLSRFTRNEFCLESKSTIGVEFATRTLQVEGRTVKAQIWDTAGQERYRAITSAYYRGALGALLVYDVTKPTTFENVSRWLKELRDHADYNIVIMLIGNKTDLKHLRAVATEDAQSYAEKEGLSFIETSALEALNVEKAFQTILSEIYRIISKKSISSDQASANANVKEGQTIDVAASSESNTKKPCCSSS

SEQ ID NO: 3875 - protein, 217 aa, Glycine max
MARRAEEEYDYLFKVVLIGDSGVGKSNLLSRFTRNEFCLESKSTIGVEFATRTLQVEGRTVKAQIWDTAGQERYRAITSAYYRGALGALLVYDVTKPTTFENVSRWLKELRDHADANIVIMLIGNKTDLKHLRAVATEDAQGYAEKEGLSFIETSALEATNVENAFQTILAEIYRIISKKSLSSNDPAANIIKEGKTITVGGAPEPNTNKPSCCTSS

SEQ ID NO: 3876 - protein, 218 aa, Populus trichocarpa
MARRPDEEYDYLFKVVLIGDSGVGKSNILSRFTRNEFCLESKSTIGVEFATRTLQVEGRTVKAQIWDTAGQERYRAITSAYYRGALGALLVYDVTKPTTFENVSRWLKELRDHADSNIVIMLIGNKTDLKHLRAVATEDAQSYAEKEGLAFVETSALEATNVDKAFQTILSEIYRIISKKTLSSEESAAPVSVKDGKTIVVGGPDPSTKKTTCCSSCG

SEQ ID NO: 3877 - protein, 217 aa, Sorghum bicolor
MKGGGDKVDYVFKVVLIGDSAVGKSQILARFARNEFSLDSKATIGVEFQTRTLVIDHKSVKAQIWDTAGQERYRAVTSAYYRGALGALLVYDITKRQSFDHIPRWLEELRGHADKNIVIMLVGNKSDLEEERAVSSEDAKEFAEKENLFFLETSALQATNVENAFQTVLTEIFKIHSKKNMAADPKANGAAPSLAGKKVIVPGPAQEIPKSKCCSSM

SEQ ID NO: 3878 - protein, 217 aa, Zea mays
MAGGGDKVDYVFKVVLIGDSAVGKSQILARFARNEFSLDSKATIGVEFQTRTLVIEHKSVKAQIWDTAGQERYRAVTSAYYRGALGALLVYDITKRQSFDHIPRWLEELRGHADKNIVIMLVGNKSDLEDERAVSTEDAKEFAEKENLFFLETSALQATNVENAFQTVLTEIFKIHSKKNMAADPRANGAAPSLAGKKVIVPGPAQEIPKSKCCSSM

SEQ ID NO: 3879 - protein, 216 aa, Oryza sativa Japonica Group
MAGGEKVDYVFKVVLIGDSAVGKSQILARFARNEFSIDSKATIGVEFQTRTLLIDHKSVKAQIWDTAGQERYRAVTSAYYRGALGALLVYDITKRQSFDHIPRWLEELRGHADKNIVIMLVGNKSDLEDERAVSTEDAKEFAEKENLFFLETSALQATNVENAFQTVLSEIFKIHSKKNMAADPKANGAAPSLAGKKVVVPGPAQEIPKSKCCSSM

SEQ ID NO: 3880 - protein, 217 aa, Sorghum bicolor
MAGAGDKVDYVFKVVLIGDSAVGKSQILARFARNEFSLDSKATIGVEFQTRTLVIDHRSVKAQIWDTAGQERYRAVTSAYYRGALGALLVYDITRRQSFDHIPRWLDELRAHADKNIVIMLVGNKSDLEEQRAVSTEDAKEFAEKENLFFLETSALQATNVESAFQTVLTEIFKIHSKKNMVSEPKSNGVAPAMAGTKVLVPGPAQEIPKSKCCSSM

SEQ ID NO: 3881 - protein, 217 aa, Zea mays
MAGAGDKVDYVFKVVLIGDSAVGKSQILARFARNEFSLDSKATIGVEFQTRTLVIDHRSVKAQIWDTAGQERYRAVTSAYYRGALGALLVYDITRRQSFDHIPRWLDELRAHADKNIVIMLVGNKSDLEEQRAVSTEDAKEFAEKENLFFLETSALQATNVESAFQTVLTEIFKIHSKKNMVSEPKSNGAAPAMPGTKVLVPGPAQEIPKSKCCSSM

SEQ ID NO: 3882 - protein, 217 aa, Zea mays
MAGAGDKVDYVFKVVLIGDSAVGKSQILARFARNEFSLDSKATIGVEFQTRTLVIDHRSVKAQIWDTAGQERYRAVTSAYYRGALGALLVYDITRRQSFDHIPRWLDELRAHADKNIVIMLVGNKSDLEEQRAVSTEDAKEFAEKENLFFLETSALQATNVESSFQTVLTEIFKIHSKKNMVSEPKSNGAAPAMPGTKVLVPGPAQEIPKSKCCSSM

SEQ ID NO: 3883 - protein, 216 aa, Hordeum vulgare subsp. vulgare
MSSVEKVDYVFKVVLIGDSAVGKSQILARFARNEFSLDSKATIGVEFQTRTLVIDHKSVKAQIWDTAGQERYRAVTSAYYRGALGALLVYDITKRQSFDHIPRWLEELRGHADKNIIIMLVGNKSDLEDERAVSTEDAKEFAEKENLFFLETSALQATNVESAFQTVLSEIFKIHSKKNIVTDPKANGAAPPLAGKKVLVPGPAQEIPKSKCCGSM

SEQ ID NO: 3884 - protein, 202 aa, Oryza sativa Japonica Group
MAGGEKVDYVFKVVLIGDSAVGKSQILARFARNEFSIDSKATIGVEFQTRTLLIDHKYRAVTSAYYRGALGALLVYDITKRQSFDHIPRWLEELRGHADKNIVIMLVGNKSDLEDERAVSTEDAKEFAEKENLFFLETSALQATNVENAFQTVLSEIFKIHSKKNMAADPKANGAAPSLAGKKVVVPGPAQEIPKSKCCSSM

SEQ ID NO: 3885 - protein, 223 aa, Populus trichocarpa
MASGGGYGDASQKIDYVFKVVLIGDSAVGKSQILARFARNEFSLDSKATIGVEFQTRTLVIDHKSVKAQIWDTAGQERYRAVTSAYYRGAVGAMLVYDITKRQTFDHIPRWLEELRNHADKNIVIILIGNKSDLEDQRAVPTEDAKEFAQKEGLFFLETSALQATNVENAFMTVLTEIFNIVNKKNLVAGEDQINGNPASLSGKKIIIPGPAQEIPAKSKCCS

SEQ ID NO: 3886 - protein, 226 aa, Vitis vinifera
MASGGGYGDSSQKIDYVFKVVLIGDSAVGKSQILARFARNEFSLDSKATIGVEFQTRTLVIQHKSVKAQIWDTAGQERYRAVTSAYYRGAVGAMLVYDITKRQSFDHIPRWLEELRGHADKNIVIILIGNKTDLEEQRAVPTEDAKEFAEKEGLFFLETSALEATNVENAFLTVLTEIFNIVNKKNLVAGEDQANGNPASLTGKRITIPGPAQEIPAKSNMCCKSS

SEQ ID NO: 3887 - protein, 358 aa, Zea mays; identical to SEQ ID NO: 1077

SEQ ID NO: 3888 - protein, 316 aa, Zea mays
MLIPRAALASTNENERTKRAPVVVVGSWRSDDSHVDGAVGRVRELEGDGGVDAGGDYPGRGAGGEDASAGGGAGAAAGGEQRGAVDEEVVAARDPAADLPLDAAVHPDVEQHVSRLDVLLHGVRHVLRHGDRVARHDRRPHRHVLVALVDRRHRHGYRHRLVAVRGERVQRLVVHAHPLVRVPRRDRHLRVCRVRPKSMHMHARALVHQSADTSYDDTRRRRRARDRTYLEVEGERRVAEVDGAQLHVLQVEGRLGGAQRQVDDEHDEAYDDGQRQDAGGDGAAAAPEDPVAVVLLLAHGDQRAAAVVAPALDWEL

SEQ ID NO: 3889 - protein, 275 aa, Zea mays
MLIPRAALASTNENERTKRAPVVVVGSWRSDDSHVDGAVGRVRELEGDGGVDAGGDYPGRGAGGEDASAGGGAGAAAGGEQRGAVDEEVVAARDPAADLPLDAAVHPDVEQHVSRLDVLLHGVRHVLRHGDRVARHDRRPHRHVLVALVDRRHRHGYRHRLVAVRGERVQRLVVHAHPLVRVPRRDRHLEVEGERRVAEVDGAQLHVLQVEGRLGGAQRQVDDEHDEAYDDGQRQDAGGDGAAAAPEDPVAVVLLLAHGDQRAAAVVAPALDWEL

SEQ ID NO: 3890 - protein, 454 aa, Sorghum bicolor; identical to SEQ ID NO: 1078

SEQ ID NO: 3891 - protein, 451 aa, Zea mays
MVDGFRWIRPGSFVLYLVFFFLSAALSEANIGDFDEYWQQRKLMADAAAEATYKHDPVEVANQLNRAVHRSVEKDDIGTRREMMGTTTRKSKFSGPCRATNPIDRCWRCRQDWATDRKRLARCAKGFGRNTTGGLAGKFYVVTDGTDDDVVNPRPGTLRWGVIQIEPLWITFAKTMIITLKEELIIRGDKTIDGRGVQVRITNGAQLTLQFVNNVIIHNIHINDIVSSNKDGGYVRDSPDHFGWRTVSDGDGITVFGSTNVWLDHLSLSNCQDGLIDVIAKSTGVTISNCHLTNHNDVMLFSSSDKHPEDQIMQITVAFNHFGRGLVQRMPRCRWGFFHVVNNDYTHWLMYAIGGSKAPTIISQGNRYIAPPNLAAKQVTKQHDTPESVWKNWVWHSENDLFMEGAYFTVTGGQINRQFNKKDLIKPRNGSYVTRLTRYAGSLACTPGKPC

SEQ ID NO: 3892 - protein, 448 aa, Oryza sativa Japonica Group
MEVLIRWSKLPAAGSLVLYAVFLLLSAAATSEANIGEYDEYWQKRKLMADAAAEATYKRDPFEVTNSFNRAVHRSEEESGRRELAMTKRKKFAGPCKATNPIDRCWRCRADWVTDRKRLARCAQGFGRNTTGGLAGKFYLVTDGTDDDVENPRPGTLRWGVIQDEPLWIIFAKDMIINLKEEMMINSDKTIDGRGAQVRITNGAQVTVQNSNNVIIHNIHIHDILQGKGGMIRDSPEHFGFRTQSDGDGISIFGSTNVWLDHLSLSNCQDGLIDVIAKSTGVTISNCHLTNHNDVMLFGSSDSFSEDQIMQITVAFNHFGRGLVQRMPRCRWGFFHVVNNDYTHWLMYAIGGSKNPTIISQGNRYIAPPNLAAKRITKQLGATEEEWKNWVWHSEEDLFMEGAYFTTSGGPIQKQFSNKDLIKPKPGSYVTRLTRFAGSIPCVAGKPC

SEQ ID NO: 3893 - protein, 444 aa, Hordeum vulgare subsp. vulgare
MEGFQWSRPVSLLLYAVLFLSAAAVSEANIGEFDEHWQRRKLEARARAEATYHPNPIEVANSLNRAVHRSLRDESGSRRKLLGLHKKFAGPCTATNPIDRCWRCRKDWATDRMRLARCAQGFGRNATGGLGGKIYIVTDGTDDDVLEPRPGTLRWGVIQNEPLWIIFARPMLIKLKEELLVGSDKTIDGRGAQVRIADGAQVTVQYSHNVIIHNIHVNDLIVGKGGRIRDSPQHAGFRTQSDGDGVSVFGSTNVWLDHLSLATCQDGLIDVIAEATGVTISNCHLTNHNDVMLFGSSDSNPKDQIMQVTVAFNHFGRGLVQRMPRCRWGFFHVVNNDYTHWLMYAIGGSKNPTIISQGNRYIAPPNLAAKLITKRLGASEAEWKNWVWHSQDDLLLNDAVFADSGGANERKFDKDDLITPKPGSYVTRLTRFAGCLPCKPGKPC

SEQ ID NO: 3894 - protein, 493 aa, Sorghum bicolor
MASPPPPPPPAAASAPPAAASGSPPPAQVVGNAFVHQYYNILHQSPELVYRFYQEASRLGRPAGTGADGMDTVTTMDAINEKIVSMGIDRAEIKAVDAQESLCGGVTVLVMGHLTGRNGVSREFVQSFFLAPQEKGYFVLNDILRYVGEGVGDEGTKQQPAPEVAADVETATPAPILANGTVGGDTGTVPQNASPQPECQVAEPALNQKEEVVNGEEVCNPTNDVEKPVVEETLVPEDINEVPNNVAVAPISSPPVPLEEAPKKSYASIVKVMKEYRPPGSAVPSRPAPLKTEKQASPAPAQVADALAFTSNPQSGSFQDPEVDAHAIYVRSLPLNATPQQLEEEFKRFGAIKHEGIQVRSNKIQGFCYGFVEFEDASAVQTAIEASPVTIGERQCYVEEKRTTGSRGGSRGGRFSPGRGGNFRGEGIRGRGTYNGGRGYGRGEFSYRSDYGGRGGGRGGSSRGDVSYQRVDHSGTASGRGARAPSAATAVAK

SEQ ID NO: 3895 - protein, 416 aa, Zea mays; identical to SEQ ID NO: 1080

SEQ ID NO: 3896 - protein, 415 aa, Zea mays
MASAHNALRVFFILAVVCAVCTAKRTGAKKEESAAAPGGAAGGSGGTFDISKLGATSDGKTDCTKAVQDAWTSACEATGSATVVIPKGDYLVGPLNFTGPCKGSSIAIQLDGNLLGSNDLNKYTASWIELSHVNNIGITGSGTLDGQGTAVYSKSKTDNVKAMPNTLVLFHVINATVAGIKLLNSKFFHINIDNSESITVKDVNVTAPADVENTDGVHVGGSSKISILNSTIGTGDDCVSIGPGCNGVLVDSITCGPGQGISVGCLGRYKDEKDVSDITVRNLLKNTTNGVRIKSYVDAESVLTASHLTFENIRMEEVANPIVIDQYFCPQKVCPGKRSNSSHVSVKDVTFRNITGTSSTPEAISLLCSETQPCSGVSLIDVNVEYAGKNNKTMAVCSNAKGTAKGSIEALACLV

SEQ ID NO: 3897 - protein, 413 aa, Sorghum bicolor
MASASNALRVFFILAILCAVCTAKRTGAKTGDSAADSAASGASGTFDISKLGATGDGKTDSTKAVQDAWTSACRATGSATVLIPKGDYLVGPLNFVGPCKGAITIQLDGNLLGSNDLAKYKASWIELSHVDNIVMTGSGTLDGQGTAVYKKAKTGTVKAMPNTLVLFYVTNGTVSGIKLLNSKFFHINIDASKNITVKDVNITAPGDVENTDGVHVGMSTKVSITNSTIGTGDDCISVGPGSDGVMVNNIICGPGQGISIGCLGRYKDEKDVTDVTVRDCVLKKTTNGVRIKSYEDAESVLTASHLTFENIRMEEVANPIIIDQYFCPEKVCPGKKSDSSHVIVKDVTFRNITGTSSTPQAISLLCSQSQPCSGVSLIDVNVEYAGKNNKTMAVCSNAKGTAKGSVEALACLA

SEQ ID NO: 3898 - protein, 428 aa, Zea mays
MAASTNNTLRVLFTLMVVCAAVCTAKRTVAKAGDLAPAPAPLGAGGATAAPEGAARASRTFDISKFGATSDGKTDSTQAVQDTWTSACGAMGDATMLIPKGDYLVGPLYFSGPCMGDITIQLDGILLGSNDLAKYTASWIQVSHVNNIVINGSGTLDGQGTAVYTKSKTDVVKAMPNTLVLFYVTNGTVSGIKLLNSKFFHINIDTSKDITVKDVNITAPADVENTDGVHVGGSSNVRITNSTIGTGDDCVSIGPGSDGVMVNNITCGPGQGISVGCLGRYKDEKDVSDVTVRDCVLRNTTNGVRIKSYEDAESVLTASHLTFENIRMEEVANPIIIDQYFCPQKVCPGKRSNSSHVSIKNVTFRNISGTSSTPEAVSLLCSETQPCSGVSLIDVNVEYAGKNNKTMAVCSNAKGTAKGSLQALDCLV

SEQ ID NO: 3899 - protein, 428 aa, Zea mays
MAASTNNTLRVLFTLMVVCAAVCTAKRTVAKTGDLAPAPAPLGAGGATAAPEGAARASRTFDISKFGATSDGKTDSTQVVQDTWTSACGAMGDATMLIPKGDYLVGPLYFRGPCMGDITIQLDGILLGSNDLAKYTASWIQVSHVNNIVINGSGTLDGQGTAVYTKSKTDVVKAMPNTLVLFYVTNGTISGIKLLNSKFFHINIDTSKDITVKDVNITAPADVENTDGVHVGGSSNVRITNSTIGTGDDCVSIGPGSDGVMVNNITCGPGQGISVGCLGRYKDEKDVSDVTVRDCVLRNTTNGVRIKSYEDAESVLTASHLTFENIRMEEVANPIIIDQYFCPQKVCPGKRSNSSHVSIKDVTFRNISGTSSTPEAVSLLCSETQPCSGVSLIDVNVEYAGKNNKTMAVCSNAKGTAKGSLQALDCLV

SEQ ID NO: 3900 - protein, 500 aa, Sorghum bicolor; identical to SEQ ID NO: 1081

SEQ ID NO: 3901 - protein, 495 aa, Zea mays
MTTPCLGAAALSASWTAPSLTGAFLDLTLAWACLCLAALAAVAARLLALLGLPLPCTCARPHLPCLLAFLARYPPRAVGSLHAALRARFPFAGPTDDEARLQKGVEEEGEEEAIDAPKEEGDFRRRVEARAELQMELEKERSAAASAAEEAMSMILRLQKEKSALEIEARQQRRTADERCAFYEDEVEELRDIVLVREREVRALRKEVDAYRRLLGFSATEEDEEEDDEQEMVTPHSFPMYEGEPSSSKSVDANRMQHFGNDSGFSFKTPSPREQPTVPPLTAGQINVGSDDCVAVQTPAKVPVVQSRLELDSSEDEDEDEDDGAETVEILPLSARSQDLDQGSHFHADTAQGMESTCTKEQTAHAFQEIECPGIDKIVNDQIGSKNDANVYDVHVVDDIRFSTEVKGLIGRSFSEATMQAERLQSRAVADDLLEKSLNAIKGAQDKIRNAANERRQSLQLQLLEDIADQLQGIKDAAEAGRQVFCAAPKSSKRS

SEQ ID NO: 3902 - protein, 221 aa, Sorghum bicolor
MSKEKHHRDWVLRRCCGSIAACILTLFALVGFIVLVIYLALHPSKPSFYLQDVQLRSIDLSDPALSLDLQVTIASRNPNDRVGVYYKTLDAFTTYRDEPVTVPVSMPSIYQGHKDVSVWSPVMSGDAVPVAQYVADAMKQDIAAGYVLLHVKVEGRVKWKVGSWVSGGYHLFVTCPALLATSGSAVAGGAFAASAASGVPAGVNTTVSLKFTHPADCTVDV

SEQ ID NO: 3903 - protein, 325 aa, Sorghum bicolor
MAMVQPADTAVKANEILARFRPIAPKPTLATAAAAASPVAQAAAEGVVAANRVLCHLQSRPCRARKRGRPTVVPVSPPKSGSGAQSPAKRKRAATPYPPLRCAAATACSASAVVPVSARLPLASLPPASAGAEDLAKVAAAEGRDVPVERDLLRKLLEPKVISPRAVRPVCSAIHVGCIHRTDATCTAAASKTAAQVEAELEVDALPAVVSDSSNRVRLVNDAYKEMVGQPECPWLYAVAATSRRISGEVALVVADQSSLPETYGVFTCTAKIEWEDDGKVTSIAVPCDVSRLHCESRDYLFTWRFRTADADASVGHSSEEISES

SEQ ID NO: 3904 - protein, 327 aa, Zea mays
MAMVQPADTAVKANEILARFRPIAPKPTLAAAAAAAAAPVAQAAAEGVVAANRVLCHLQSRPCRARKRGRPTVVPVSPKSGAQPPAKRRRASTPYPPLRCAAATTGAHVSAVVPGSARLPPASAGVEDIAKAAAAAATEEGRDVPVERDLLRKLLEPRVISPRAVRPVWSAIHVGCIHRTDDAACTDAAVSKTAVQVEAELEVDALPAVVSDSGNRVRLVNDAYKEMVGQPECPWLDAVAATSRRISGEVALVVADRSSLPDSYGAFTCTAKIEWEDDGKVTSIAAPCDVSRLQCESRDYLFAWRFRTAAADADASVGHSSEEISES

SEQ ID NO: 3905 - protein, 312 aa, Zea mays
MAMVQAADAAVKANEILARFRPIAPNPTLAAEGVVAANRVLCHLQSKPCRARKRGRPGPAVVAPSPESGLQPPAKRKRATTPYPPLRCRGPRASAAVPGSAGLPLASASLPPAGAGTAEDLAKVAAEGRDVPVERDLLRKLLEPKVISPRAVRPVCSAIHVGCIHRADATCTAAVSKTAVRVEAELEVDALPAVVSDASNRVRLVNDAYKEMVGQPECPWLDAVAATSRRISGEVALVVANQSSLPESYGVFTCTAKIEWEDDGKVASIDVPCDVSRLQCESREYLFVWRFRTADADADASVGCSSEEISES

SEQ ID NO: 3906 - protein, 475 aa, Sorghum bicolor
MAPARRCSLLALALSLSLCSVFAAAAQQAADRVAGLPGQPPVGFAQYAGYVTVNETHGRALFYWFFEATSSPDKKPLVLWLNGGPGCSSIGYGEAEELGPFLVQKGKPELRWNNYSWNTEANLMFLESPVGVGFSYTNTSSDLQQLGDKITADDAYKFLLNWFKRFPQYKSHDFYIAGESYAGHYVPQLSEKIFDGNRAGPKESYINFKGLMVGNALMDDETDQTGMIDYAWDHAVISDRVYGDVKAKCDFAMVNVTDACDAALQEYFAVYRLIDMYSLYTPVCTDPGSSASASASHRKVAVHGAAPRIFSKYRGWIMKPAGYDPCTAEYAEVYFNRPDVQAALHANVTKIGYNWTHCSDVIGTWNDAAFSTLPIIRKLVAGGLRVWVFSGDTDGRIPVTATRLTLNKLGLKTVQEWTPWYDRLQVGGWTIVYEGLTFVTIRGAGHEVPLHAPRQALTLFSNFLAGTKMPPTAFL

SEQ ID NO: 3907 - protein, 485 aa, Zea mays
MAGAWSLLALSLSLCSVAAVAVQQVNTVAAAQQAADRVAGLPGQPPVGFAQYAGYVTVNETHGRALFYWFFEATASPDKKPLVLWLNGGPGCSSIGYGEAEELGPFLVQKGKPELRWNNYSWNTEANLMFLESPVGVGFSYTNTSSDLLQLGDKITADDAYKFLLNWFKRFPQYRSHDFYIAGESYAGHYVPQLSEKIFDGNRAGPKESYVNLKGLMVGNALMDDETDQTGMVDYAWDHAVISDRVYADVKARCDFSMANVTDACNAALQEYFAVYRLIDMYSLYTPVCTDDPAGSSASSSYDARGHRKVAVHGAAPRIFSKYRGWIMKPAGYDPCTAQYAETYFNRPDVQAALHANVTKIGYNWTHCSDVINTWNDAAFSTLPTIRKLVAGGLRVWVFSGDTDGRIPVTSTRLTLNKLGLKTVQEWTPWYDHLQVGGWTIVYEGLTFVTIRGAGHEVPLHAPRQALTLFSNFLAGTKMPPMAFP

SEQ ID NO: 3908 - protein, 486 aa, Zea mays
MAGAWSLLALALSLCSVAAVAVQQVNTVAAAQQAADRVAGLPGQPPVGFAQYAGYVTVNETHGRALFYWFFEATASPDKKPLVLWLNGGPGCSSIGYGEAEELGPFLVQKGKPELRWNNYSWNTEANLMFLESPVGVGFSYTNTSSDLLQLGDKITADDAYKFLLNWFKRFPQYRSHDFYIAGESYAGHYVPQLSEKIFDGNRAGPKESYVNLKGLMVGNALMDDETDQTGMVDYAWDHAVISDRVYADVKARCDFSMANVTDACNAALQEYFAVYRLIDMYSLYTPVCTDDPAGASALPSSYDARGHRKVAVHGAAPRIFSKYRGWIMKPAGYDPCTAEYAETYFNRPDVQAALHANVTKIGYNWTHCSDVINTWNDAAFSTLPTIRKLVASGLRVWVFSGDTDGRIPVTSTRLTLNKLGLKTIQEWTPWYDHLQVGGWTVVYEGLTFVTIRGAGHEVPLHAPRQALTLFSNFLAGTKMPPTAFP

SEQ ID NO: 3909 - protein, 485 aa, Oryza sativa Japonica Group
MAGATAAAVSSSFLALALLSLCAAAAGGSPQLDAEAARQQEADRVTRLPGQPAVRFAQYAGYVTVNETHGRALFYWFFEATAAADKKPLVLWLNGGPGCSSVGYGEAEELGPFLVQKGKPELKWNKYSWNKEANLMFLESPVGVGFSYTNTSSDLQQLGDKITADDAYIFLLNWFKRFPQYKSHDFYIAGESYAGHYVPQLSEKIFDGNKQGPKENYINFKGFMIGNALMDDETDQTGMIDYAWDHAVISDRVYADVKKYCNFSMENVTDACDSALTEYFAVYRLIDMYSLYTPVCTEVSSSAAFGQRQVAVHGAAPKIFSKYHGWYMRPAGYDPCTSDHAEVYFNRADVQEALHANVTNIGYNWTHCSDVIGKWRDAPFSTLPIIRKLVAGGIRVWVFSGDTDGRIPVTSTRLTLNKLGLKTVQEWTPWYDHQQVGGWTILYEGLTFVTIRGAGHEVPLHAPRQALSLFSHFLADKKMPPTAFP

SEQ ID NO: 3910 - protein, 485 aa, Oryza sativa Indica Group
MAGATAAAVSSSFLALALLSLCAAAAGGSPQLDAEAARQQEADRVTRLPGQPAVRFAQYAGYVTVNETHGRALFYWFFEATAGADKKPLVLWLNGGPGCSSVGYGEAEELGPFLVQKGKPELKWNKYSWNKEANLMFLESPVGVGFSYTNTSSDLQQLGDKITADDAYIFLLNWFKRFPQYKSHDFYIAGESYAGHYVPQLSEKIFDGNKQGPKENYINFKGFMIGNALMDDETDQTGMIDYAWDHAVISDRVYADVKKYCNFSMENVTDACDSALTEYFAVYRLIDMYSLYTPVCTEVSSSAAFGQRQVAVHGAAPKIFSKYHGWYMRPAGYDPCTSDHAEVYFNRADVQEALHANVTNIGYNWTHCSDVIGKWRDAPFSTLPIIRKLVAGGIRVWVFSGDTDGRIPVTSTRLTLNKLGLKTVQEWTPWYDHQQVGGWTILYEGLTFVTIRGAGHEVPLHAPRQALSLFSHFLADKKMPPTAFP

SEQ ID NO: 3911 - protein, 484 aa, Musa acuminata
MRLFSISSASFLLVLLFSCSLVRGGRSRELDREALRQQEADRVVGLPGQPPVSFRQYAGYVTVNESHGRALFYWFFEATHDVEKKPLLLWLNGGPGCSSIGYGAAEELGPFLMQKGVPELRFNQHSWNKGKKPIPKANLLFLESPVGVGFSYTNTSSDLQSLGDKITAEDSYIFLVNWLKRFPQYKSHDFYIAGESYAGHYVPQLSEKIFDENKKASKETYINFKGFMIGNALMDDDTDQTGMIDYAWDHAVISDRVYHDVKSNCNFGIEPATEACNNALREYFAVYRIIDMYSLYAPVCTSITSTRKSFQIEGAAPKLFSRYSGWHQKPAGYDPCVSDYSEVYFNRPDVQEALHANTTKIGYNWTHCSEVVTKWNDSPATMLPVIRKLINGGLRVWVFSGDTDGRIPVTSTRYTLNKLGMKTIQEWKPWYDRKQVGGWTIVFEGLTFVTVRGAGHQVPTFAPRQAQQLIHHFLANQQLPPSAF

SEQ ID NO: 3912 - protein, 790 aa, Sorghum bicolor
MRRRPFLSILLLLLLAASATTPTPAASSSARAAFACAPGGPATTLPFCRQSLPLHARARDLVSRLTRAEKVRLLVNNAAGVARLGVGGYEWWSEALHGVSDTGPGVKFGGAFPGATAFPQVIGAAAALNATLWELIGRAVSDEARAMYNGGRAGLTFWSPNVNIFRDPRWGRGQETPGEDPAISSRYAAAYVRGLQQPYDHNRLKLAACCKHFTAYDLDSWGGTDRFHFNAVVSPQDLEDTFNVPFRACVAGGRAASVMCSYNQVNGVPTCADQGFLRGTIRKAWGLDGYIVSDCDSVDVFFRDQHYTRTAEDAVAATLRAGLDLDCGPFLALYTENAVARKKVSDADVDAALLNTVTVQMRLGMFDGDPASGPFGHLGAADVCTKAHQDLALDAARQSVVLLKNQRGRKHRDRDVLPLRPAAHRVVAVVGPHADATVAMIGNYAGKPCRYTTPLQGVAAYAARVVHQAGCADVACQGKNQPIAAAVDAARRLTPPSSSPGLTRSLLLPGRQAELISAVAKAAKGPVILVLMSGGPIDIAFAQNDPRIDGILWVGYPGQAGGQAIADVIFGQHNPGGKLPVTWYPQDYLEKVPMTNMAMRANPARGYPGRTYRFYTGPTIHAFGHGLSYTQFTHTLAHAPAQLTVRLSTSSASASASASAASLLNATRPSRAVRVAHARCEGLTVPVHVDVRNVGDRDGAHAVLVYHVAPSSSSSSAPAGTDAPARQLVAFEKVHVPAGGVARVEMGIDVCDRLSVADRDGVRRIPVGEHRLMIGELTHSVTLGVEQLGA

SEQ ID NO: 3913 - protein, 794 aa, Zea mays
MRSRPLLLLLLLVAATAAPTASPSSAFACAPGGPAASLPFCRQSLPLRARARDLVSRLTRAEKVRLLVNNAAGVPRLGVAGYEWWSEALHGVSDTGPGVRFGGAFPGATAFPQVIGTAASLNATLWELVGRAVSDEARAMYNGGRAGLTFWSPNVNIFRDPRWGRGQETPGEDPAVSARYAAAYVRGLQQPYAAPNGGHRNRLKLAACCKHFTAYDLDKWGGTDRFHFNAVVAAQDLEDTFNVPFRACVEDGRAASVMCSYNQVNGVPTCADAAFLRGTIRGRWGLDGYIVSDCDSVDVFFRDQHYTRTPEDAAAATLRAGLDLDCGPFLALYAGSAVAAGKVADADVDAALLNTVTVQMRLGMFDGDPAAGPFGRLGPADVCTREHQDLALDAARQGVVLLKNRRGARHNRDVLPLRPAAHRVVAVVGPHADATVAMIGNYAGKPCRYTTPLQGVAAYAARVAHQAGCTDVACRGNQPIAAAVEAARQADATVVVAGLDQRVEAEGLDRTTLLLPGRQAELISAVAKASKGPVILVLMSGGPIDIAFAQNDPRIDGILWVGYPGQAGGQAIADVIFGHHNPGAKLPVTWYHQDYLQKVPMTNMAMRANPARGYPGRTYRFYTGPTIYPFGHGLSYTQFTHTLAHAPTQLTVRLSGSGHSAASAASLLNATLARPVRAVRVAHARCEGLTVPVHVDVSNVGDRDGAHAVLVYHAAPSPSHAAPGADAPARQLVAFEKVHVPAGGVARVEMRIGVCDRLSVADRNGVRRVPVGEHRLMIGELTHSVSLGVEQLGV

SEQ ID NO: 3914 - protein, 822 aa, Oryza sativa Japonica Group
MRRLLLLPLLVLAGAAVGGGVVPVAARSAFACAAGGPAATLPFCRRSLPARARARDLVARLTRAEKVRLLVNNAAGVPRLGVAGYEWWSEALHGVSDTGPGVRFGGAFPGATAFPQVIGTAASFNATLWELIGQVMPILKGGHARCNQRPSCIRISVFMYVYVCAQAVSDEGRAMYNGGQAGLTFWSPNVNIFRDPRWGRGQETPGEDPAVAARYAAAYVRGLQQQQPSSGRLKLAACCKHFTAYDLDNWSGTDRFHFNAVVTRQDLEDTFNVPFRSCVVDGRAASVMCSYNQVNGVPTCADAAFLRGTIRRRWGLAGYIVSDCDSVDVFYSDQHYTRTREDAVAATLRAGLDLDCGPFLAQYTEGAVAQGKVGDGDIDAAVTNTVTVQMRLGMFDGDPAAQPFGHLGPQHVCTAAHQELAVEAARQGIVLLKNDGRALPLSPATARRAVAVVGPHAEATVAMIGNYAGKPCRYTTPLQGVARYAARAAHQPGCTDVACAGSGQPIAAAVDAARRADATIVVAGLDQKIEAEGLDRASLLLPGRQAELISSVAKASKGPVILVLMSGGPIDIGFAQNDPKIAGILWAGYPGQAGGQAIADVIFGHHNPGGKLPVTWYPQDYLQKVPMTNMAMRANPAKGYPGRTYRFYTGPTIHPFGHGLSYTSFTHSIAHAPSQLTVRLSAHHAAASASASLNATARLSRAAAVRVAHARCEELRMPVHVDVRNVGERDGAHTVLVYAAAPASSAAEAAAGHGAPVRQLVAFEKVHVGAGGTARVEMGIDVCDGLSVADRNGVRRIPVGEHRLIIGELTHTVTIALEQLGV

SEQ ID NO: 3915 - protein, 655 aa, Zea mays
MYNGGRAGLTFWSPNVNIFRDPRWGRGQETPGEDPAVSARYAAAYVRGLQQPYAAPNGGHRNRLKLAACCKHFTAYDLDKWGGTDRFHFNAVVAAQDLEDTFNVPFRACVEDGRAASVMCSYNQVNGVPTCADAAFLRGTIRGRWGLDGYIVSDCDSVDVFFRDQHYTRTPEDAAAATLRAGLDLDCGPFLALYAGSAVAAGKVADADVDAALLNTVTVQMRLGMFDGDPAAGPFGRLGPADVCTREHQDLALDAARQGVVLLKNRRGARHNRDVLPLRPAAHRVVAVVGPHADATVAMIGNYAGKPCRYTTPLQGVAAYAARVAHQAGCTDVACRGNQPIAAAVEAARQADATVVVAGLDQRVEAEGLDRTTLLLPGRQAELISAVAKASKGPVILVLMSGGPIDIAFAQNDPRIDGILWVGYPGQAGGQAIADVIFGHHNPGAKLPVTWYHQDYLQKVPMTNMAMRANPARGYPGRTYRFYTGPTIYPFGHGLSYTQFTHTLAHAPTQLTVRLSGSGHSAASAASLLNATLARPVRAVRVAHARCEGLTVPVHVDVSNVGDRDGAHAVLVYHAAPSPSHAAPGADAPARQLVAFEKVHVPAGGVARVEMRIGVCDRLSVADRNGVRRVPVGEHRLMIGELTHSVSLGVEQLGV

SEQ ID NO: 3916 - protein, 885 aa, Oryza sativa Indica Group
MRRLLLLPLLVLAGAAAGGGVVPVAARSAFACAAGGPAATLPFCRRSLPARARARDLVARMTRAEKVRLLVNNAAGVPRLGVAGYEWWSEALHGVSDTGPGVRFGGAFPGATAFPQVIGTAASFNATLWELIGQFRSSLSSMDKTLGPKSDAHLASVSKSKKEGHNGIPSVLYSVLANEEFDHERECEHKHTVENSRANAVLHSNLVEYTIGCIRISVFMYVYVCAQAVSDEGRAMYNGGQAGLTFWSPNVNIFRDPRWGRGQETPGEDPAVAARYAAAYVRGLQQQQPSSGRLKLAACCKHFTAYDLDNWSGTDRFHFNAVVTRQDLEDTFNVPFRSCVVDGRAASVMCSYNQVNGVPTCADAAFLRGTIRRRWGLAGYIVSDCDSVDVFYSDQHYTRTREDAVAATLRAGLDLDCGPFLAQYTEGAVAQGKVGDGDIDAAVTNTVTVQMRLGMFDGDPAAQPFGHLGPQHVCTAAHQELAVEAARQGIVLLKNDGRALPLSPATARRAVAVVGPHAEATVAMIGNYAGKPCRYTTPLQGVARYAARAAHQPGCTDVACAGSGQPIAAAVDAARRADATIVVAGLDQKIEAEGLDRASLLLPGRQAELISSVAKASKGPVILVLMSGGPIDIGFAQNDPKIAGILWAGYPGQAGGQAIADVIFGHHNPGGKLPVTWYPQDYLQKVPMTNMAMRANPAKGYPGRTYRFYTGPTIHPFGHGLSYTSFTHSIAHAPSQLTVRLAAHHAAASASASASLNATARLSRAAAVRVAHARCEELRMPVHVDVRNVGERDGAHTVLVYAAAPASSAAEAAAGHGAPVRQLVAFEKVHVGAGGTARVEMGIDVCDGLSVADRNGVRRIPVGEHRLIIGELTHTVTIALEQLGV

SEQ ID NO: 3917 - protein, 883 aa, Oryza sativa Japonica Group
MRRLLLLPLLVLAGAAVGGGVVPVAARSAFACAAGGPAATLPFCRRSLPARARARDLVARLTRAEKVRLLVNNAAGVPRLGVAGYEWWSEALHGVSDTGPGVRFGGAFPGATAFPQVIGTAASFNATLWELIGQFRSSLSSMDKTLGPKSDAHLASVSKSKKEGHNGIPSVLYSVLANEEFDHERECEHKHTVENSRANAVLHSNLVEYTIGCIRISVFMYVYVCAQAVSDEGRAMYNGGQAGLTFWSPNVNIFRDPRWGRGQETPGEDPAVAARYAAAYVRGLQQQQPSSGRLKLAACCKHFTAYDLDNWSGTDRFHFNAVVTRQDLEDTFNVPFRSCVVDGRAASVMCSYNQVNGVPTCADAAFLRGTIRRRWGLAGYIVSDCDSVDVFYSDQHYTRTREDAVAATLRAGLDLDCGPFLAQYTEGAVAQGKVGDGDIDAAVTNTVTVQMRLGMFDGDPAAQPFGHLGPQHVCTAAHQELAVEAARQGIVLLKNDGRALPLSPATARRAVAVVGPHAEATVAMIGNYAGKPCRYTTPLQGVARYAARAAHQPGCTDVACAGSGQPIAAAVDAARRADATIVVAGLDQKIEAEGLDRASLLLPGRQAELISSVAKASKGPVILVLMSGGPIDIGFAQNDPKIAGILWAGYPGQAGGQAIADVIFGHHNPGGKLPVTWYPQDYLQKVPMTNMAMRANPAKGYPGRTYRFYTGPTIHPFGHGLSYTSFTHSIAHAPSQLTVRLSAHHAAASASASLNATARLSRAAAVRVAHARCEELRMPVHVDVRNVGERDGAHTVLVYAAAPASSAAEAAAGHGAPVRQLVAFEKVHVGAGGTARVEMGIDVCDGLSVADRNGVRRIPVGEHRLIIGELTHTVTIALEQLGV

SEQ ID NO: 3918 - protein, 331 aa, Zea mays; identical to SEQ ID NO: 1082

SEQ ID NO: 3919 - protein, 326 aa, Oryza sativa Indica Group
MVSSAMAAVAVAFAVVVAATTSSAQLDPHFYDGLCPAALPTIKRIVEEAVAAEPRMGASLLRLHFHDCFVNGCDGSILLDDTPFFTGEKNAAPNMNSVRGFDVIDRIKDAVNAACRRNVVSCADIVAVAARDSIVALGGPSYHVPLGRRDARTASQAAANSSIPAPTLNLDGLVSSFAAQGLSVQDLVLLSGAHTLGFSRCTNFRDRLYNETTTLDASLAASLGGTCPRTAGAGDDNLAPLDPTPARFDAAYYASLLRARGLLHSDQQLFAGGGLGATDGLVRFYAANPDAFRRDFAESMVRMASLSPLVGSQGEVRVNCRKVNYY

SEQ ID NO: 3920 - protein, 321 aa, Oryza sativa Japonica Group
MAAVAVAFAVVVAATMSSAQLDPHFYDGLCPAALPTIKRIVEEAVAAEPRMGASLLRLHFHDCFVNGCDGSILLDDTPFFTGEKNAAPNMNSVRGFDVIDRIKDAVNAACRRNVVSCADIVAVAARDSIVTLGGPSYHVPLGRRDARTASQAAANSSIPAPTLNLDGLVSSFAAQGLSVQDLVLLSGAHTLGFSRCTNFRDRLYNETATLDASLAASLGGTCPRTAGAGDDNLAPLDPTPARFDAAYYASLLRARGLLHSDQQLFAGGGLGATDGLVRFYAANPDAFRRDFAESMVRMASLSPLVGSQGEVRVNCRKVNYY

SEQ ID NO: 3921 - protein, 326 aa, Oryza sativa Japonica Group
MVSSAMAAVAVAFAVVVAATMSSAQLDPHFYDGLCPAALPTIKRIVEEAVAAEPRMGASLLRLHFHDCFVNGCDGSILLDDTPFFTGEKNAAPNMNSVRGFDVIDRIKDAVNAACRRNVVSCADIVAVAARDSIVTLGGPSYHVPLGRRDARTASQAAANSSIPAPTLNLDGLVSSFAAQGLSVQDLVLLSGAHTLGFSRCTNFRDRLYNETATLDASLAASLGGTCPRTAGAGDDNLAPLDPTPARFDAAYYASLLRARGLLHSDQQLFAGGGLGATDGLVRFYAANPDAFRRDFAESMVRMASLSPLVGSQGEVRVNCRKVNYY

SEQ ID NO: 3922 - protein, 327 aa, Hordeum vulgare subsp. vulgare
MASRSCFSFSIVCVVAVMAFAILATASNAQPLDPHFYDKVCPAALPAIRKVVEEAVAVEPRMGASLLRLHFHDCFVNGCDGSILLDDTPLFTGEKKAAPNVNSVRGFDVIDRIKDAVNAACGGNVVSCADVVAVAARDSVVALGGPSYDVLLGRRDARVASQAAANKSIPAPTMDLDGLVSNFASHGLTAQDLVVLSGGHTLGFSRCTNFRDRLYNETATLDASLAAQLRGPCPLAAGDDNLAPLDPTPARFDGGYYGSLLRSRGLLHSDQQLLAGGPSPSPTDALVRFYAANPEAFRRDFADAMVRMGGLITGSGGEIRVDCRKVT

SEQ ID NO: 3923 - protein, 335 aa, Zea mays
  misc_feature (291)..(291): Xaa can be any naturally occurring amino acid
MGECEDGKEYRCWEELLPDALGLIFRNLPLQEVLTVLPRVCKSWGRVVAGPYCWQEIDIEEWSQQQSKPEQIGRMVELLVGRSGGSCRRISVSGLPCDPLFSFIADNARALGTLEIPRSEISDSVVEAVAPRLSNVTFLDISSCTKIGARALEAFGRHCRSLVGLRRVMHPIDLADKVCQHDEAHAIARSMPRLRHLEMGYMLVATEAVLEILEQCSELKFLDLRGCWAVDDRFLRERHPGLRVLGPRVVDDCYENSYWEECSDYYSDEDEDYDDDVVSWGLFVDDDDDYXYAVGSDDDEAIWDDAQGLENLEVRFYGGGGFGESFAGFDWPPSP

SEQ ID NO: 3924 - protein, 335 aa, Zea mays
MGECEDGKEYRCWEELLPDALGLIFRNLPLQEVLTVLPRVCKSWGRVVAGPYCWQEIDIEEWSQQQSKPEQIGRMVELLVGRSGGSCRRISVSGLPCDPLFSFIADNARALGTLEIPRSEISDSVVEAVAPRLSNVTFLDISSCTKIGARALEAFGRHCRSLVGLRRVMHPIDLADKVCQHDEAHAIARSMPRLRHLEMGYMLVATEAVLEILEQCSELKFLDLRGCWAVDDRFLRERHPGLRVLGPRVVDDCYENSYWEECSDYYSDEDEDYDDDVVSWGLFVDDDDDYYYAVGSDDDEAIWDDAQGLENLEVRFYGGGGFGESFAGFDWPPSP

SEQ ID NO: 3925 - protein, 365 aa, Sorghum bicolor
MLGKMIFFPFSCFEPKRPKLLRSSPQVSGAAVAFVWKGKEREVMGECEDGKEYRCWEELLPDALGLIFRNLPLQEMLTVVPRVCKSWGRVVAGPYCWQEIDIEEWSQQQSKPDQIGRMVELLIGRSGGSCRRISVSGLPCDPLFSFIGDNARALRTLEIPRSEISDSIVETVAPRLSNVTFLDISSCTKIGARALEAFGKHCKSLVGLRRVMHPIDLVDKVCQHDEAHAIACSMPKLRHLEMGYMLIATEAVLEILGQCRDLKFLDLRGCWTVDDKFLRERHPGLRVLGPRVDDCYENSYWEECSDYSDDSSIYSWEFMDDDYYAVGSDDEAIWDDGQGLENLEVRFYGGGFSESFAGFDWPPSP

SEQ ID NO: 3926 - protein, 324 aa, Oryza sativa Japonica Group
MGECGGGEYRCWEELLPDALGLVFRNLPLREVLTVVPRVCKSWSRVVAGPYCWQEIDIEEWRQQQGKPEQLVRMVEMLVARSCGSCRRISVSGLPGDPLFSFIGDHARALRTLEIPRSEISDAAVESVAPRLPNVTFLDISSCTKIGARALEAFGKNCKSLVGLRRVMHPTDVAGKACQRDEARAIACTMPRLRHLEMGYMVIATDAVLDILARCRDLRFLDLRGCWAVDDKFLQERHPGLRVLGPGVDDCFENSYLEECSDYSDDSSIYSWELMEDDDDDYYAVGSDDEAIWDDGQGLENLEVRFYGGGFSESYAGFDWPPSP

SEQ ID NO: 3927 - protein, 332 aa, Zea mays
MGECEDGKEYRCWEELLPDALGLIFRNLPLQEVLTVLPRVCKSWGRVVAGPYCWQEIDIEEWSQQQGKPEQIARMVELLVGRSAGSCRRISVSGLPCDPRFSFIGDNARALRTLEIPRSEISDSMVESVAPRLPNVTFLDISSCTKMGARGLEAFGKHCKSLAGLRRVMHPIDLADRACQHDEAHAIACSMPRLRHLEMGYMLVATEAVAEILGRCRELRFLDLRGCWAVDDKLLPRDRHPGLRVLGPRVDDCYENSYWEECSDDYSDDSSIYSWELMDDVDDDYDYAAGSDDDDDEAVWDDDGQGLENLEVRFYGGGFGETFAGFDWPPSP

SEQ ID NO: 3928 - protein, 338 aa, Zea mays
MLQGSEVMGECEDGKEYRCWEELLPDALGLIFRNLPLQEVLTVLPRVCKSWGRVVAGPYCWQEIDIEEWSQQQSKPEQIARMVELLVGRSAGSCRRISVSGLPCDPRFSFIGDNARALRTLEIPRSEISDSMVESVAPRLPNVTFLDISSCTKIGARGLEAFGKHCKSLAGLRRVMHPIDLADRACQHDEAHAIACSMPRLRHLEMGYMLVATEAVAEILGRCRELRFLDLRGCWAVDDKLLLRDRHPGLRVLGPRVDDCYENSYWEECSDDYSDDSSIYSWELMDDVDDDYDYAAAGSDDDEAVWDDDGQGLENLEVRFYGGGFGETFAGFDWPPSP

SEQ ID NO: 3929 - protein, 331 aa, Zea mays
MGECEDGKEYRCWEELLPDALGLIFRNLPLQEVLTVLPRVCKSWGRVVAGPYCWQEIDIEEWSQQQSKPEQIARMVELLVGRSAGSCRRISVSGLPCDPRFSFIGDNARALRTLEIPRSEISDSMVESVAPRLPNVTFLDISSCTKIGARGLEAFGKHCKSLAGLRRVMHPIDLADRACQHDEAHAIACSMPRLRHLEMGYMLVATEAVAEILGRCRELRFLDLRGCWAVDDKLLLRDRHPGLRVLGPRVDDCYENSYWEECSDDYSDDSSIYSWELMDDVDDDYDYAAAGSDDDEAVWDDDGQGLENLEVRFYGGGFGETFAGFDWPPSP

SEQ ID NO: 3930 - protein, 317 aa, Oryza sativa Japonica Group
MGECSEHRCWDELLPDALGLIFRKLSLKDVLTVVPRVCKSWGRVVAGPYCWQEIDIQEWSQQQSKPDQLKRMVRMLVARSGGSFHRISVSGLPGDPLFTFIGDHARSLKTMELPRSDISDSLVENVAPRLSNVTFLDISSCTKIGARALEAFGKHCKSLIGLRRVMHPTDVVGRASQHDEARAIACNMPKLRHLEIGYMLIATKAVVEIASQCHDLKFLDLRGCWNVDDKLLQESYPGLKVVGPYVDDCYENSFWEECSDDSDDSIYWELMDDDYYAAGSDDEGIWDDGQGLEGLEVRFYGGGFSESHAGFDWPPSP

SEQ ID NO: 3931 - protein, 324 aa, Hordeum vulgare subsp. vulgare
MEEHGEQRCWEDLLPDALGLIFRNLSLQEMLTVVPRVCKSWSRVVSGPYCWQEIDIQEWSQQQNKPDQLARMVHTLVTRSDGSFRRISVSGLPSDSLFTFIANHARSLKTLELPRSEISDCIVEDVAQRLSNVTFLDVSSCTKIGARALEAFGKNCKSLVGLRRVMHPIDVAGKVCQHDEARAIAGSMPKLRHLEIGYMLIATNAVVEIASRCHDLKFLDLRGCWGVDDKLLQEKYPGLKILGPRVDDCYENSFLEECSDDSDDDDDSIYSWEEFMDDEDDDDYFAAEALWHDDHALEGLEVRFYGGGFGEGEGFAGFDWPESP

SEQ ID NO: 3932 - protein, 1177 aa, Sorghum propinquum
MASGSRATPTRSPSSARPEAPRHAHHHHHHSQSSGGSTSRAGGGGGGGGGGGGTAATATATATESVSKAVAQYTLDARLHAVFEQSGASGRSFDYSQSLRAPPTPSSEQQIAAYLSRIQRGGHIQPFGCTLAVADDSSFRLLAFSENAADLLDLSPHHSVPSLDSAAPPHVSLGADARLLFSPSSAVLLERAFAAREISLLNPLWIHSRVSSNPFYAILHRIDVGVVIDLEPARTEDPALSIAGAVQSQKLAVRAISRLQALPGGDIKLLCDTVVEHVRELTGYDRVMVYRFHEDEHGEVVAESRRDNLEPYLGLHYPATDIPQASRFLFRQNRVRMIADCHATPVRVIQDPGMSQPLCLVGSTLRAPHGCHAQYMANMGSIASLVMAVIISSGGDDEQTGRGGISSAMKLWGLVVCHHTSPRCIPFPLRYACEFLMQAFGLQLNMELQLAHQLSEKHILRTQTLLCDMLLRDSPTGIVTQSPSIMDLVKCDGAALYYHGKYYPLGVTPTESQIKDIIEWLTVCHGDSTGLSTDSLADAGYLGAAALGDAVCGMAVAYITPSDYLFWFRSHTAKEIKWGGAKHHPEDKDDGQRMHPRSSFKAFLEVVKSRSLPWENAEMDAIHSLQLILRDSFRDAAEGTSNSKAIVNGQVQLGELELRGINELSSVAREMVRLIETATVPIFAVDTDGCINGWNAKIAELTGLSVEEAMGKSLVNDLIFKESEEIVEKLLSRALRGEEDKNVEIKLKTFGSEQSNGAIFVIVNACSSRDYTQNIVGVCFVGQDVTGQKVVMDKFINIQGDYKAIVHNPNPLIPPIFASDENTSCSEWNTAMEKLTGWSRGEVVGKFLIGEVFGSFCRLKGPDALTKFMVVIHNAIGGQDYEKFPFSFFDKNGKYVQALLTANTRSKMDGKSIGAFCFLQIASAEIQQAFEIQRQQEKKCYARMKELAYICQEIKNPLSGIRFTNSLLQMTDLNDDQRQFLETCSACEKQMSKIVKDATLQSIEDGSLVLEKSEFSFGDVMNAVVSQAMLLLRERDLQLIRDIPDEIKDASAYGDQFRIQQVLADFLLSMVRSAPSENGWVEIQVRPNVKQNSDGTDTELFIFRFACPGEGLPADIVQDMFSNSQWSTQEGVGLSTCRKILKLMGGEVQYIRESERSFFLIVLELPQPRPAADREIS

SEQ ID NO: 3933 - protein, 1177 aa, Sorghum bicolor subsp. x drummondii
MASGSRATPTRSPSSARPEAPRHAHHHHHHSQSSGGSTSRAGGGGGGGGGGGGTAATATATATESVSKAVAQYTLDARLHAVFEQSGASGRSFDYSQSLRAPPTPSSEQQIAAYLSRIQRGGHIQPFGCTLAVADDSSFRLLAFSENAADLLDLSPHHSVPSLDSAAPPPVSLGADARLLFSPSSAVLLERAFAAREISLLNPLWIHSRVSSKPFYAILHRIDVGVVIDLEPARTEDPALSIAGAVQSQKLAVRAISRLQALPGGDIKLLCDTVVEHVRELTGYDRVMVYRFHEDEHGEVVAESRRDNLEPYLGLHYPATDIPQASRFLFRQNRVRMIADCHATPVRVIQDPGMSQPLCLVGSTLRAPHGCHAQYMANMGSIASLVMAVIISSGGDDEQTGRGGISSAMKLWGLVVCHHTSPRCIPFPLRYACEFLMQAFGLQLNMELQLAHQLSEKHILRTQTLLCDMLLRDSPTGIVTQSPSIMDLVKCDGAALYYHGKYYPLGVTPTESQIKDIIEWLTVCHGDSTGLSTDSLADAGYLGAAALGDAVCGMAVAYITPSDYLFWFRSHTAKEIKWGGAKHHPEDKDDGQRMHPRSSFKAFLEVVKSRSLPWENAEMDAIHSLQLILRDSFRDAAEGTSNSKAIVNGQVQLGELELRGINELSSVAREMVRLIETATVPIFAVDTDGCINGWNAKIAELTGLSVEEAMGKSLVNDLIFKESEEIVEKLLSRALRGEEDKNVEIKLKTFGSEQSNGAIFVIVNACSSRDYTQNIVGVCFVGQDVTGQKVVMDKFINIQGDYKAIVHNPNPLIPPIFASDENTSCSEWNTAMEKLTGWSRGEVVGKFLIGEVFGSFCRLKGPDALTKFMVVIHNAIGGQDYEKFPFSFFDKNGKYVQALLTANTRSKMDGKSIGAFCFLQIASAEIQQAFEIQRQQEKKCYARMKELAYICQEIKNPLSGIRFTNSLLQMTDLNDDQRQFLETCSACEKQMSKIVKDATLQSIEDGSLVLEKSEFSFGDVMNAVVSQAMLLLRERDLQLIRDIPDEIKDASAYGDQFRIQQVLADFLLSMVRSAPSENGWVEIQVRPNVKQNSDGTDTELFIFRFACPGEGLPADIVQDMFSNSQWSTQEGVGLSTCRKILKLMGGEVQYIRESERSFFLIVLELPQPRPAADREIS

SEQ ID NO: 3934 - protein, 1178 aa, Sorghum bicolor
MASGSRATPTRSPSSARPEAPRHAHHHHHHHSQSSGGSTSRAGGGGGGGGGGGGTAATATATATESVSKAVAQYTLDARLHAVFEQSGASGRSFDYSQSLRAPPTPSSEQQIAAYLSRIQRGGHIQPFGCTLAVADDSSFRLLAFSENAADLLDLSPHHSVPSLDSAAPPPVSLGADARLLFSPSSAVLLERAFAAREISLLNPLWIHSRVSSKPFYAILHRIDVGVVIDLEPARTEDPALSIAGAVQSQKLAVRAISRLQALPGGDIKLLCDTVVEHVRELTGYDRVMVYRFHEDEHGEVVAESRRDNLEPYLGLHYPATDIPQASRFLFRQNRVRMIADCHATPVRVIQDPGMSQPLCLVGSTLRAPHGCHAQYMANMGSIASLVMAVIISSGGDDEQTGRGGISSAMKLWGLVVCHHTSPRCIPFPLRYACEFLMQAFGLQLNMELQLAHQLSEKHILRTQTLLCDMLLRDSPTGIVTQSPSIMDLVKCDGAALYYHGKYYPLGVTPTESQIKDIIEWLTVCHGDSTGLSTDSLADAGYLGAAALGDAVCGMAVAYITPSDYLFWFRSHTAKEIKWGGAKHHPEDKDDGQRMHPRSSFKAFLEVVKSRSLPWENAEMDAIHSLQLILRDSFRDAAEGTSNSKAIVNGQVQLGELELRGINELSSVAREMVRLIETATVPIFAVDTDGCINGWNAKIAELTGLSVEEAMGKSLVNDLIFKESEEIVEKLLSRALRGEEDKNVEIKLKTFGSEQSNGAIFVIVNACSSRDYTQNIVGVCFVGQDVTGQKVVMDKFINIQGDYKAIVHNPNPLIPPIFASDENTSCSEWNTAMEKLTGWSRGEVVGKFLIGEVFGSFCRLKGPDALTKFMVVIHNAIGGQDYEKFPFSFFDKNGKYVQALLTANTRSKMDGKSIGAFCFLQIASAEIQQAFEIQRQQEKKCYARMKELAYICQEIKNPLSGIRFTNSLLQMTDLNDDQRQFLETCSACEKQMSKIVKDATLQSIEDGSLVLEKSEFSFGDVMNAVVSQAMLLLRERDLQLIRDIPDEIKDASAYGDQFRIQQVLADFLLSMVRSAPSENGWVEIQVRPNVKQNSDGTDTELFIFRFACPGEGLPADIVQDMFSNSQWSTQEGVGLSTCRKILKLMGGEVQYIRESERSFFLIVLELPQPRPAADREIS

SEQ ID NO: 3935 - protein, 1178 aa, Sorghum bicolor subsp. verticilliflorum
MASGSRATPTRSPSSARPEAPRHAHHHHHNHSQSSGGSTSRAGGGGGGGGGGGGTAATATATATESVSKAVAQYTLDARLHAVFEQSGASGRSFDYSQSLRAPPTPSSEQQIAAYLSRIQRGGHIQPFGCTLAVADDSSFRLLAFSENAADLLDLSPHHSVPSLDSAAPPPVSLGADARLLFSPSSAVLLERAFAAREISLLNPLWIHSRVSSKPFYAILHRIDVGVVIDLEPARTEDPALSIAGAVQSQKLAVRAISRLQALPGGDIKLLCDTVVEHVRELTGYDRVMVYRFHEDEHGEVVAESRRDNLEPYLGLHYPATDIPQASRFLFRQNRVRMIADCHATPVRVIQDPGMSQPLCLVGSTLRAPHGCHAQYMANMGSIASLVMAVIISSGGDDEQTGRGGISSAMKLWGLVVCHHTSPRCIPFPLRYACEFLMQAFGLQLNMELQLAHQLSEKHILRTQTLLCDMLLRDSPTGIVTQSPSIMDLVKCDGAALYYHGKYYPLGVTPTESQIKDIIEWLTVCHGDSTGLSTDSLADAGYLGAAALGDAVCGMAVAYITPSDYLFWFRSHTAKEIKWGGAKHHPEDKDDGQRMHPRSSFKAFLEVVKSRSLPWENAEMDAIHSLQLILRDSFRDAAEGTSNSKAIVNGQVQLGELELRGINELSSVAREMVRLIETATVPIFAVDTDGCINGWNAKIAELTGLSVEEAMGKSLVNDLIFKESEEIVEKLLSRALRGEEDKNVEIKLKTFGSEQSNGAIFVIVNACSSRDYTQNIVGVCFVGQDVTGQKVVMDKFINIQGDYKAIVHNPNPLIPPIFASDENTSCSEWNTAMEKLTGWSRGEVVGKFLIGEVFGSFCRLKGPDALTKFMVVIHNAIGGQDYEKFPFSFFDKNGKYVQALLTANTRSKMDGKSIGAFCFLQIASAEIQQAFEIQRQQEKKCYARMKELAYICQEIKNPLSGIRFTNSLLQMTDLNDDQRQFLETCSACEKQMSKIVKDATLQSIEDGSLVLEKSEFSFGDVMNAVVSQAMLLLRERDLQLIRDIPDEIKDASAYGDQFRIQQVLADFLLSMVRSAPSENGWVEIQVRPNVKQNSDGTDTELFIFRFACPGEGLPADIVQDMFSNSQWSTQEGVGLSTCRKILKLMGGEVQYIRESERSFFLIVLELPQPRPAADREIS

SEQ ID NO: 3936 - protein, 1178 aa, Sorghum bicolor
MASGSRATPTRSPSSARPEAPRHAHHHHHHHSQSSGGSTSRAGGGGGGGGGGGGTAATATATATESVSKAVAQYTLDARLHAVFEQSGASGRSFDYSQSLRAPPTPSSEQQIAAYLSRIQRGGHIQPFGCTLAVADDSSFRLLAFSENAADLLDLSPHHSVPSLDSAAPPPVSLGADARLLFSPSSAVLLERAFAAREISLLNPLWIHSRVSSKPFYAILHRIDVGVVIDLEPARTEDPALSIAGAVQSQKLAVRAISRLQALPGGDIKLLCDTVVEHVRELTGYDRVMVYRFHEDEHGEVVAESRRDNLEPYLGLHYPATDIPQASRFLFRQNRVRMIADCHATPVRVIQDPGMSQPLCLVGSTLRAPHGCHAQYMANMGSIASLVMAVIISSGGDDEQTGRGGISSAMKLWGLVVCHHTSPRCIPFPLRYACEFLMQAFGLQLNMELQLAHQLSEKHILRTQTLLCDMLLRDSPTGIVTQSPSIMDLVKCDGAALYYHGKYYPLGVTPTESQIKDIIEWLTVCHGDSTGLSTDSLADAGYLGAAALGDAVCGMAVAYITPSDYLFWFRSHTAKEIKWGGAKHHPEDKDDGQRMHPRSSFKAFLEVVKSRSLPWENAEMDAIHSLQLILRDSFRDAAEGTSNSKAIVNGQVQLGELELRGINELSSVAREMVRLIETATVPIFAVDTDGCINGWNAKIAELTGLSVEEAMGKSLVNDLIFKESEEIVEKLLSRALRGEEDKNVEIKLKTFGSEQSNGAIFVIVNACSSRDYTQNIVGVCFVGQDVTGQKVVMDKFINIQGDYKAIVHNPNPLIPPIFASDENTSCSEWNTAMEKLTGWSRGEVVGKFLIGEVFGSFCRLKGPDALTKFMVVIHNAIGGQDYEKFPFSFFDKNGKYVQALLTANTRSKMDGKSIGAFCFLQIASAEIQQAFEIQRQQEKKCYARMKELAYICQEIKNPLSGIRFTNSLLQMTDLNDDQRQFLETCSACEKQMSKIVKDTTLQSIEDGSLVLEKSEFSFGDVMNAVVSQAMLLLRERDLQLIRDIPDEIKDASAYGDQFRIQQVLADFLLSMVRSAPSENGWVEIQVRPNVKQNSDGTDTELFIFRFACPGEGLPADIVQDMFSNSQWSTQEGVGLSTCRKILKLMGGEVQYIRESERSFFLIVLELPQPRPAADREIS

SEQ ID NO: 3937 - protein, 1178 aa, Sorghum bicolor
MASGSRATPTRSPSSARPEAPRHAHHHHHHHSQSSGGSTSRAGGGGGGGGGGGGTAATATATATESVSKAVAQYTLDARLHAVFEQSGASGRSFDYSQSLRAPPTPSSEQQIAAYLSRIQRGGHIQPFGCTLAVADDSSFRLLAFSENAADLLDLSPHHSVPSLDSAAPPPVSLGADARLLFSPSSAVLLERAFAAREISLLNPLWIHSRVSSKPFYAILHRIDVGVVIDLEPARTEDPALSIAGAVQSQKLAVRAISRLQALPGGDIKLLCDTVVEHVRELTGYDRVMVYRFHEDEHGEVVAESRRDNLEPYLGLHYPATDIPQASRFLFRQNRVRMIADCHATPVRVIQDPGMSQPLCLVGSTLRAPHGCHAQYMANMGSIASLVMAVIISSGGDDEQTGRGGISSAMKLWGLVVCHHTSPRCIPFPLRYACEFLMQAFGLQLNMELQLAHQLSEKHILRTQTLLCDMLLRDSPTGIVTQSPSIMDLVKCDGAALYYHGKYYPLGVTPTESQIKDIIEWLTVCHGDSTGLSTDSLADAGYLGAAALGDAVCGMAVAYITPSDYLFWFRSHTAKEIKWGGAKHHPEDKDDGQRMHPRSSFKAFLEVVKSRSLPWENAEMDAIHSLQLILRDSFRDAAEGTSNSKAIVNGQAQLGELELRGINELSSVPREMVRLIETATVPIFAVDTDGCINGWNAKIAELTGLSVEEAMGKSLVNDLIFKESEEIVEKLLSRALRGEEDKNVEIKLKTFGSEQSNGAIFVIVNACSSRDYTQNIVGVCFVGQDVTGQKVVMDKFINIQGDYKAIVHNPNPLIPPIFASDENTSCSEWNTAMEKLTGWSRGEVVGKFLIGEVFGSFCRLKGPDALTKFMVVIHNAIGGQDYEKFPFSFFDKNGKYVQALLTANTRSKMDGKSIGAFCFLQIASAEIQQAFEIQRQQEKKCYARMKELAYICQEIKNPLSGIRFTNSLLQMTDLNDDQRQFLETCSACEKQMSKIVKDATLQSIEDGSLVLEKSEFSFGDVMNAVVSQAMLLLRERDLQLIRDIPDEIKDASAYGDQFRIQQVLADFLLSMVRSAPSENGWVEIQVRPNVKQNSDGTDTELFIFRFACPGEGLPADIVQDMFSNSQWSTQEGVGLSTCRKILKLMGGEVQYIRESERSFFLIVLELPQPRPAADREIS

SEQ ID NO: 3938 - protein, 1178 aa, Sorghum bicolor
MASGSRATPTRSPSSARPEAPRHAHHHHHHHSQSSGGSTSRAGGGGGGGGGGGGTAATATATATESVSKAVAQYTLDARLHAVFEQSGASGRSFDYSQSLRAPPTPSSEQQIAAYLSRIQRGGHIQPFGCTLAVADDSSFRLLAFSENAADLLDLSPHHSVPSLDSAAPPPVSLGADARLLFSPSSAVLLERAFAAREISLLNPLWIHSRVSSKPFYAILHRIDVGVVIDLEPARTEDPALSIAGAVQSQKLAVRAISRLQALPGGDIKLLCDTVVEHVRELTGYDRVMVYRFHEDEHGEVVAESRRDNLEPYLGLHYPATDIPQASRFLFRQNRVRMIADCHATPVRVIQDPGMSQPLCLVGSTLRAPHGCHAQYMANMGSIASLVMAVIISSGGDDEQTGRGGISSAMKLWGLVVCHHTSPRCIPFPLRYACEFLMQAFGLQLNMELQLAHQLSEKHILRTQTLLCDMLLRDSPTGIVTQSPSIMDLVKCDGAALYYHGKYYPLGVTPTESQIKDIIEWLTVCHGDSTGLSTDSLADAGYLGAAALGDAVCGMAVAYITPSDYLFWFRSHTAKEIKWGGAKHHPEDKDDGQRMHPRSSFKAFLEVVKSRSLPWENAEMDAIHSLQLILRDSFRDAAEGTSNSKAIVNGQVQLGELELRGINELSSVAREMVRLIETATVPIFAVDTDGCINGWNAKIAELTGLSVEEAMGKSLVNDLIFKESEEIVEKLLSRALRGEEDKNVEIKLKTFGSEQSNGAIFVIVNACSSRDYTQNIVGVCFVGQDVTGQKVVMDKFINIQGDYKAIVHNPNPLIPPIFASDENTSCSEWNTAMEKLTGWSRGEVVGKFLIGEVFGSFCRLKGPDALTKFMVVIHNAIGGQDYEKFPFSFFDKNGKYVQALLTANTRSKMDGKSIGAFCFLQIASAEIQQAFEIQRQQEKKCYARMKELAYICQEIKNPLSGIRFTNSLLQMTDLNDDQRQFLETCSACEEQMSKIVKDATLQSIEDGSLVLEKSEFSFGDVMNAVVSQAMLLLRERDLQLIRDIPDEIKDASAYGDQFRIQQVLADFLLSMVRSAPSENGWVEIQVRPNVKQNSDGTDTELFIFRFTYPGEGLPADIVQDMFSNSQWSTQEGVGLSTCRKILKLMGGEVQYIRESERSFFLIVLELPQPRPAADREIS

SEQ ID NO: 3939 - protein, 1161 aa, Zea mays
MASGSRATPTRSPSSARPEAPRHAHHHHHSQSSGGSTSRAGGGAAATESVSKAVAQYTLDARLHAVFEQSGASGRSFDYSQSLRAPPTPSSEQQIAAYLSRIQRGGHIQPFGCTLAVADDSSFRLLAFSENSPDLLDLSPHHSVPSLDSSAPPHVSLGADARLLFSPSSAVLLERAFAAREISLLNPIWIHSRVSSKPFYAILHRIDVGVVIDLEPARTEDPALSIAGAVQSQKLAVRAISRLQALPGGDVKLLCDTVVEHVRELTGYDRVMVYRFHEDEHGEVVAESRRDNLEPYLGLHYPATDIPQASRFLFRQNRVRMIADCHATPVRVIQDPGLSQPLCLVGSTLRAPHGCHAQYMANMGSIASLVMAVIISSGGDDEQTGRGGISSAMKLWGLVVCHHTSPRCIPFPLRYACEFLMQAFGLQLNMELQLAHQLSEKHILRTQTLLCDMLLRDSPTGIVTQSPSIMDLVKCDGAALYYHGKYYPLGVTPTESQIKDIIEWLTVFHGDSTGLSTDSLADAGYLGAAALGEAVCGMAVAYITPSDYLFWFRSHTAKEIKWGGAKHHPEDKDDGQRMHPRSSFKAFLEVVKSRSLPWENAEMDAIHSLQLILRDSFRDAAEGTNNSKAIVNGQVQLRELELRGINELSSVAREMVRLIETATVPIFAVDTDGCINGWNAKIAELTGLSVEEAMGKSLVNDLIFKESEATVEKLLSRALRGEEDKNVEIKLKTFGSEQSKGPIFVVVNACSSRDYTQNIVGVCFVGQDVTGQKVVMDKFVNIQGDYKAIVHNPNPLIPPIFASDENTSCSEWNTAMEKLTGWSRGEVVGKFLIGEVFGNCCRLKGPDALTKFMVIIHNAIGGQDYEKFPFSFFDKNGKYVQALLTANTRSKMDGKSIGAFCFLQIASTEIQQAFEIQRQQEKKCYARMKELAYICQEIKNPLSGIRFTNSLLQMTDLNDDQRQFLETSSACEKQMSKIVKDASLQSIEDGSLVLEQSEFSLGDVMNAVVSQAMLLLRERDLQLIRDIPDEIKDASAYGDQCRIQQVLADFLLSMVRSAPSENGWVEIQVRPNVKQNSDGTNTELFIFRFACPGEGLPADVVQDMFSNSQWSTQEGVGLSTCRKILKLMGGEVQYIRESERSFFLIVLEQPQPRPAAGREIV

SEQ ID NO: 3940 - protein, 1166 aa, Zea mays
MASDSRPPKRSPSARRVAPRHAHHHHSQSSGGSTSRAGAGGGGGGAAATESVSKAVAQYNLDARLHAVFEQSGASGRSFDYSQSLRAPPTPSSEQQIAAYLSRIQRGGHIQPLGCTLAVADDSSFRLLAFSENAADLLDLSPHHSVPSLDSVALPPVSLGADARLYFSPSSAVLLERAFAAREISLLNPLWIHSRASSKPFYAILHRIDVGVVIDLEPARTEDPALSIAGAVQSQKLAVRAISRLQALPGGDVKLLCDTVVEHVRELTGYDRVMVYKFHEDEHGEVVAESRRDNLEPYLGLHYPATDIPQASRFLFQQNRVRMIADCHAIPVRVIQDPGLSQQLCLVGSTLRAPHGCHAQYMANMGSIASLVMAVIISSGGDDERTGRGAISSSMKLWGLVVCHHTSPRCIPFPLRYACEFLMQAFGLQLNMELQLAHQLSEKHILRTQTLLCDMLLRDSPAGIITQSPSVMDLVKCDGAALYYRGKYYPLGVTPTESQIKDIIEWLTVCHGDSTGLSTDSLADAGYLGAVALGDAVCGMAVAYITPSDYLFWFRSHTAKEIKWGGAKHHPEDKDDGQRMHPRSSFKAFLEVVKSRSLSWENAEMDAIHSLQLILRDSFRDAAEGTSNSKAIVNGQRQLGELELRGINELSSVAREMVRLIETATVPIFAVDTDGCINGWNAKIAELTGLSVEEAMGKSLVNDLIFKECDDIVEKLLSRALRGEEDKNVEIKLKTFGSEQSKGAIFVIVNACSSRDYTQNIVGVCFVGQDVTGQKVVMDKFINIQGDYKAIVHNPNPLLPPIFASDENTSCSEWNTAMEKLTGWSREEVVGKFLIGEVFGNCCRLKGPDALTKFMVVIHNAIEGHDSEKFPFSFFDKNGKYVQALLTANTRSKMDGKSIGAFCFLQIASAEIQQAFEIQRQQEKKCYARMKELAYICQEIKNPLSGIRFTNSLLQMTDLNDDQRQFLETSSACEKQMSKIVKDASLKSIEDGSLVLEKSEFSLGDVMNAVVSQTMSLLRERDLQLIRDIPDEIKDASAYGDQFRIQQVLADFLLSMAQSAPSENGWVEIQVRPNVKQNYDGTDTELFIFRFACPGEGLPADIVQDMFSNSQWSTQEGVGLSTCRKILKLMGGEVQYIRESERSFFLIVLELPQPRLAAGRENQLIC

SEQ ID NO: 3941 - protein, 1171 aa, Oryza sativa Japonica Group
MASGSRATPTRSPSSARPAAPRHQHHHSQSSGGSTSRAGGGGGGGGGGGGGAAAAESVSKAVAQYTLDARLHAVFEQSGASGRSFDYTQSLRASPTPSSEQQIAAYLSRIQRGGHIQPFGCTLAVADDSSFRLLAYSENTADLLDLSPHHSVPSLDSSAVPPPVSLGADARLLFAPSSAVLLERAFAAREISLLNPLWIHSRVSSKPFYAILHRIDVGVVIDLEPARTEDPALSIAGAVQSQKLAVRAISRLQALPGGDVKLLCDTVVEYVRELTGYDRVMVYRFHEDEHGEVVAESRRNNLEPYIGLHYPATDIPQASRFLFRQNRVRMIADCHAAPVRVIQDPALTQPLCLVGSTLRSPHGCHAQYMANMGSIASLVMAVIISSGGDDDHNISRGSIPSAMKLWGLVVCHHTSPRCIPFPLRYACEFLMQAFGLQLNMELQLAHQLSEKHILRTQTLLCDMLLRDSPTGIVTQSPSIMDLVKCDGAALYYHGKYYPLGVTPTEVQIKDIIEWLTMCHGDSTGLSTDSLADAGYPGAAALGDAVSGMAVAYITPSDYLFWFRSHTAKEIKWGGAKHHPEDKDDGQRMHPRSSFKAFLEVVKSRSLPWENAEMDAIHSLQLILRDSFRDSAEGTSNSKAIVNGQVQLGELELRGIDELSSVAREMVRLIETATVPIFAVDTDGCINGWNAKVAELTGLSVEEAMGKSLVNDLIFKESEETVNKLLSRALRGDEDKNVEIKLKTFGPEQSKGPIFVIVNACSSRDYTKNIVGVCFVGQDVTGQKVVMDKFINIQGDYKAIVHNPNPLIPPIFASDENTCCSEWNTAMEKLTGWSRGEVVGKLLVGEVFGNCCRLKGPDALTKFMIVLHNAIGGQDCEKFPFSFFDKNGKYVQALLTANTRSRMDGEAIGAFCFLQIASPELQQAFEIQRHHEKKCYARMKELAYIYQEIKNPLNGIRFTNSLLEMTDLKDDQRQFLETSTACEKQMSKIVKDASLQSIEDGSLVLEKGEFSLGSVMNAVVSQVMIQLRERDLQLIRDIPDEIKEASAYGDQYRIQQVLCDFLLSMVRFAPAENGWVEIQVRPNIKQNSDGTDTMLFLFRFACPGEGLPPEIVQDMFSNSRWTTQEGIGLSICRKILKLMGGEVQYIRESERSFFHIVLELPQPQQAASRGTS

SEQ ID NO: 3942 - protein, 633 aa, Zea mays
MPEAPVVTMRDTAAAAPPATHRDLLEYIERVTAGAAQVQRRVLSEILAQNAPAEYLRRLGVSGAAPGAVEAFRRAAPLVTYEDILPDVLRIANGDTSPILSGKPIREFLTSSGTSGGERKLMPAIADEMDRRSLLYSLLMPVMSQAVPGLDRGRCMYLYFVKAGSRTPGGHPARPVLTSFYRSRHFLERPHDPYTVHTSPDEAVLCVDAYQSMYAQLLCGLVHRADVLRVGAVFASGFLRAIRFLEKHWQRLCRDLRRGALGAEVTDRSVRAAVARVLRADPALADAVEAECARPSWQGIIRRVWPGTKYIDVIVTGAMAQYIPTLEFYGGGLPLTCTMYASSESYFGINLNPMCKPSEVAYTLIPTMCYFEFLPLPQPGPGGTDDADPDHRDLVDLVDVKLGHEYELVVTTYSGLYRYRVGDVLRVAGFKNQAPMFKFLRRKNVVLSIDSDKTDEAELHAAVSGAVQHLAPFGASLVEYTSYADAGTIPGHYVLFWELRLRAGDVPVPVPASVFEDCCLAVEEALNSVYRQGRAADRSIGPLEIRVVSDGTFDRLMDYALARGASINQYKVPRCVHPGPVVELLDGRVQASYVSPKCPKWSPGGGKQWSSDAAAKKPAAAAGSNNGGGAVVA

SEQ ID NO: 3943 - protein, 537 aa, Zea mays
  misc_feature (130)..(130): Xaa can be any naturally occurring amino acid
MEAALTQQAAATATATPTRWRCVGDASLASHGQGQQRAGAVRLGAARRAVSGAVRASSSRHLGPVRALVSEAAGGERAAEGEGMDTAVRLFVGLPADAVVSDGRGVGRPRAVSAALRALKLLGVDGVELXVSWAVAQPGPGGWFEWAGYRAVAAMVRDAGLDLRVSLRTDGDALPGWVADAAAADPDVLFTDRSGHRRMGCLSFAVDELPVLVGKSPLQAYEAFFRSFAEEFDDLFGSTITDVTISLGPNGELQYPSYPPGNQGSRGFDGVGEFQCYDKYMLARLKRHAESSGQPLWGLSGPHDGPRYDDESPESSAFFRELGGSWKSAYGEFFLSWYTGELLAHGDRVLAAASSAFRGKPVELSAKVPLLRGPGTGPSPADATAGFHGGYGPVAEMFARHGCAVIAAGVEARPDATAEERLAQVKAACTEHGVHLAAESAPLAVARGSDGDGPTRVVWLSAGRTRPCQFTYQRMGAEFFSPGHWPLFVQFVRALECPEEAHEDDLPASADGGERLTVPSAAAAAPKDQATREVQTV

SEQ ID NO: 3944 - protein, 529 aa, Sorghum bicolor
MEAALMQQAAAAAAARWRCVGDASLAGHGQQHLAGVVRLGVARRAASRAVRASSSTRLLAPVRALVSEAAGERAAEGEEEEGAAVRLFVGLPADAVVSDGRGVSRPRAVSAALRALKLLGVDGVELPVSWAVVQPGAGGWFEWAGYRAVAAMVRDAGLHLRVSLRTDGDALPEWVADAADADPDVLFTDRSGHRRVGCLSFAVDELPVLLGKSPLQAYEAFFRSFADEFEDFLGSTITDVTVSLGPNGELQFPSYPPGNHGAGGYAGIGEFQCYDKYMLARLKRHAESSGQPLWGLSGPHDGPRYDESPESSAFFREPGGSWKSAYGEFFLSWYAGELLAHGDRVLAAASRALGGKPVALSAKVPLLRGPSPVDATAGLHGGYGPVAEMFARHGCAVIASGVEAQPDATAEDRLARLKAACAEHGARLAAESAPLAAARDGAGAAGGVWLSAGRTRPCQFTYQRMGAEFFSPAHWPLFVQFVRALECPEEAHEDDLPGSADGGARLTVPSAAAAAPRGEATREVQIQTV

SEQ ID NO: 3945 - protein, 227 aa, Zea mays; identical to SEQ ID NO: 1562

SEQ ID NO: 3946 - protein, 227 aa, Zea mays
MAKTTQPTAGMRDPLLPTSTAASPPPYLDPHPADSYTYTVLLVPVRLHRGLCRGGRCIVPCLTVLFLLALAGFLLWPADPDISLARLHLAHVSVVARPAVAVTISATLKVRVRNPDLFALDYTRLDVAIGYRGAGLGRVTSGGGRVRARAVSYVDANLQLDGIRVVEDAMYLLEDLAQGSVPFDTIAEVEGHLHFLFLSIPVKGRISCVMHINPHNQTIVHQDCYPE

SEQ ID NO: 3947 - protein, 221 aa, Zea mays
MAKTTQPTAGMRDPLLPTSTAASPPPYLDPHPADSYTYTVFLVPVRLRRGLCRGGRCIVPCLTVLFLLALAGFLLWPADPDISLARLHLAHVSVVARPAVAVTISATLKVRVRNPDLFALDYTRLDVAIGYRGAGLGRVTSGGGRVRARAVSYVDANLQLDGIRVVEDAMYLLEDLAQGSVPFDTIAEVEGHLHFLFLSIPVKVNGSFLVFYIVIYADLMN

SEQ ID NO: 3948 - protein, 231 aa, Sorghum bicolor
MAKTTQPTAGARDPLLPTSGAAVASPPPYLDPHPADSYTVLLVPVRLRHRLRRGSGRCCGVGPCLTALFLLLALAGFLLWPADPDVSLARLRLAHVSVVARPAVAVTISAALKVRVRNPDFFALDYNRLDVAIAYRGAPLGRVTSGGGRVRARAVSYVDADLQLDGIRVVEDAIYLVEDLARGSVPFDTIVEVEGHLHFFFLSIPVKGRISCVVHVNPHNETIVHQDCYPE

SEQ ID NO: 3949 - protein, 226 aa, Oryza sativa Japonica Group
MAKAQPPPAREPLLPSSASPPPYLDARAGADANADSYVLLVPVRLRRLRRGCRCRCLGPLLSTLALLSLAGFLLWPADPDVSVARLRLAHVSVSARPTVRVTISAALKVRVRNPDLFALDYGRLDVDIGYRGAPLGRVTSGGGRVRARAVSYIDANLSLDGISVVEDAIYLLEDLARGSVPFDTVAEVEGHVHLFFLSIPVKGRISCVVHINPHNQTIVHQDCYPD

SEQ ID NO: 3950 - protein, 341 aa, Zea mays
MDRHTCRLCFRRFHNGRALGGHMRSHVMAASSAAARSPLPRQQSPPFSLASTSSTEMGDGPARQKPLAAPCVAREGATKAFGFPGLSGGGRPARGESSVVQDGESDTESSPRFAVSRRRSKRARRRAPPPAVASSDPEQPASSVSDATPEEDVAMSLVMLSRDSWTRSRSGWGPASSEAAEQDHDDDGVRSLVGADYADHEHGVARSDHGRHQCGACRKVFRSYQALGGHRASVKRGKGGCVPVPVPPPAAPSSKARRAENGPAVHECPFCFRVFESGQALGGHKRAHMPSGAPAPRPPSPWTPAKCGDSSMSIDLNVPAATDDDFELSAVYDTEFGGNRQ

SEQ ID NO: 3951 - protein, 342 aa, Zea mays
MDRHTCRLCFRRFHNGRALGGHMRSHVMAASSAAAHSPLPRQQLASLSLASTSSTEMGDEPARQKPLAAPCVAREGARKAFGFPGLSGGGRPARGESSVVQDGESDTESSPRFAVSRRRSKRARRRAPPPPAVASSDPEQPASSVSDATPEEDVAMSLVMLSRDSWTRSRSGWGPASSEAAEQVHDDDGVRSLVGADYADHEHGVARSDHGRHQCGACRKVFRSYQALGGHRASVKRGKGGCLPVPVPPPAAPSSKARRAENGPAVHECPFCFRVFESGQALGGHKRAHMPSGAPAPRPPSPWTPAKCGDSSMSIDLNVPAATDDDFELSAVYDTEFGGTRQ

SEQ ID NO: 3952 - protein, 340 aa, Zea mays
MDRHTCKLCFRRFHNGRALGGHMRSHVMAASSAAAYYSPPPLSLASTSSTEMDDDADPAPQKPPTPCVAREEGAKKAFCFPELSGGGRAARGESSVVQDGESDTESSPRFAVSRRRSKRARRRAPPPAASDPEHPASSVSDATPEEDVAMSLVMLSRDSWTRRSRPGPGPGPDPRWGPASSGADRSKDGGVRSFVGADDEADREHGDVARPRGRHRCGVCRKVFRSYQALGGHRASVKKGKGGCVPVPVPPSAAAPSPKARRGQTGPAVHECPFCSRVFESGQALGGHKRAHVAHGAPAPWTPARCGDSSGSIDLNVPAATDDDFELSAVYDAEFGSARQ

SEQ ID NO: 3953 - protein, 386 aa, Sorghum bicolor
MDRHTCKLCFRRFHNGRALGGHMRSHVMAASAAAFHSPLLSRQPQSPPLSLSLASTSSTEMGDDKPSAQQKPPPTPCVVREGTKKRFDDSPGFSSRGRAARGGESSVVQDGESDTESSSPRFAVVSRRRSKRARRRAPPPAVVVASDDPEQPAASSVSDAMPVEDVAMSLVMLSRDSWTRSSRSGRGDPASSEAVQRQNNDHDDDDDDGVRSFVGVGADDADHHEHEDDDVVARPPRGGRHHQCGVCRKVFRSYQALGGHRASIKKGKGGCLPVPVPVPPPAAPSSSKSHCRAENNGPAPAVHECPFCFRVFESGQALGGHKRAHMPSSAAGAGAPAPPTTPSPRTPAAKCGDSSGSFDLNVPAAATDDDFELSAVYDTEFGGGRQ

SEQ ID NO: 3954 - protein, 322 aa, Zea mays; identical to SEQ ID NO: 1083

SEQ ID NO: 3955 - protein, 298 aa, Zea mays
MARRSLAVDATAGAASRVRFAPTSNNLLVSSWDSGLRLYDADEGTLRVNVESEAAFLDCCFEDESAAFACGSDGSVRRYDFHSGSQDTVGLHEDALACIEFSSLTGQIMTGSLDKKLKLWDSKTRNVSPSGTITLNSDVASISICGIYILAAVERNVYLYDMRNLTRPVDEKDCPLDYQIRCLHTSLEWNAYVAGSVDGVVALKYLDRGTDRDLGYAFRCHPNSRNGKWNLVPVNCISVHPCNRTFVTGDDKGCTIVWDAQLKKKLIELPMYLGSVASVAYNHNGQLLAVASNYFLEV

SEQ ID NO: 3956 - protein, 1354 aa, Sorghum bicolor
MDGPATSPASEVPFRISFSGHGGHLRLDPTPHTHSLIPDFVLPPAYPAESPSSVKEYLERNYLNPELHLPTAADSGRVWDVDWFALARPPLEPSAPRTTLAPAWVPPFRRGRQKLQSASESQVWDPESVQMEMVDVFGSGTGGIAPRMPGPAKDFVRGSINNRPFRPGGLQDDTAEAAALEKAFPEGARNGDWVRELMSGGPAQVAPPGFRKGLELGQLKEYKSHWKCFRDGELVEEQPASSSNDTMEKYSVQFDDLFKIAWEEDAANKLLQEGVVQQSAESEGINEIGKQKVALQDASETIITLDAKKQEADVIRDVPETQTDLDQMLSSEVQAAAGREPGVSGDEKPTQDGMVWALVGGDEDIVTNFYKLVPDMAIEFPFELDKFQKEAIYYLEKGESVFVAAHTSAGKTVVAEYAFALATKHCTRAVYTAPIKTISNQKYRDFSGKFDVGLLTGDVSIRPEATCLIMTTEILRSMLYRGADIIRDIEWVIFDEVHYVNDAERGVVWEEVPNTVEFADWIGRTKQKKIRVTSTNKRPVPLEHCLFYSGEVYKICERDMFLTQGFKEAKDAFKKKNSNKFGVKPGPRSGTPAVRAGTQGKNPDTSNKGRDQKYPKHHNSNSGAATVQQSSSGPKRFETLFWMPLVNNLLKKSLVPVVIFCFSKNRCDKSADSMFGADLTSSSEKSEIRVFCDKAFSRLKGSDRNLPQVVGIQSLLRRGIGVHHAGLLPIVKEVVEMLFCRGVIKVLFSTETFAMGVNAPARTVVFDSLRKFDGKEHRKLLPGEYIQMAGRAGRRGLDNIGTVIIMCRDEIPEESDLKNLIVGKPTRLESQFRLTYTMILHLLRVEELKVEDMLKRSFAEFHAQKNLPEKEKLLLQMLRQPTRTIECIKGEPSIEEYYEVALEAEKHRESITQAIMQLPNSQQFLTPGRLVVVKSDCDDDHLLGVILKNPSPMLKKYVVLVLTGDCSSSVLAPEFNKNEKGPGDFQGGQFIALKGKRGMDDEYYSSVISRKGSGVITIKLPYKGDASGMGFEVRAIENKEIMIICTSKIKVDQVRLLEDPNKITYSRTVQQLMKEQPDGTKFPPALDAIKDLKMKDMDLVESYHAYHRLLQKMSENKCHGCIKLKEHISLMKEEKMYKDELSKLKFQMSDEALKQMPEFQGRIELLKIIEYIDSDLVVQLKGRVACEMNSGEELISTECLFENQLDDLEPEEAVAIMSAFVFQQRNASEPSLTPKLAEAKKRLYDTAIELGKLQADLQVPVDPEEYARDNLKFGLVEVVYEWAKGTPFSDICELTDVSEGIIVRTIVRLDETCREFRNAASIMGNSALFKKMEIASNAIKRDIVFAASLYVTGI

SEQ ID NO: 3957 - protein, 1452 aa, Oryza sativa Japonica Group
MDAPSGPLVTTTGRRKEGGLDAADATGCAPVVVIERSLRARLRQERRVIGGDDIGRRDGGGESSGKRTASSPAAASMGDLTTSSPASEVPFRVSFSGHGGHLRLDPTPNPPSPIPEFVLPPAYPLESPSSVKEYLEANYLNPELHLPTAADGARVWDLDWFELARPPLEPSAPRTMLVPAWEPPFRRRRPPLSSSSSRQESQVWDPESVQMDMSDVFDSGTGGITPRMPGPAKDFVRGSVNSRPFRPGGLHDDAAAAAALEKAFPEGARNGDWVRELMSGGPAQVNPPGFRKGLDLGNLKEYKSHWKCYQDGERVDEQSTSSSNDTMDKYSVQFDDLFKIAWEEDSDDKVPREDHVQQLVGDEETNDVDKQNISKLQNASETIENLDIEKQKGGAQGDVSEPQSDLDQMLLSSVKDTSRDSSGSGDGSMAKEGKVWALVGGDEDIVTNFYKLVPDMAIEYPFELDKFQKEAIYYLQKGESVFVAAHTSAGKTVVAEYAFALATKHCTRAVYTAPIKTISNQKYRDFCGKFDVGLLTGDVSIRPEATCLIMTTEILRSMLYRGADIIRDIEWVIFDEVHYVNDAERGVVWEEVIIMLPKHINIVLLSATVPNTVEFADWIGRTKQKKIHVTSTNKRPVPLEHCLFYSGEVFKICEKDAFLTQGYREAKEVFKKKNSSKLGMKPGSKPGTTAVRAGTQGRNPDTSSRGRDQKNPKHHHASSSAAAVQQSTSGPRRSESSFWMPLINNLLKKSLVPVVIFCFSKNRCDRSAESMFGADLTSNSEKSEIRLFCDKAFSRLKGSDRNLPQVVGIQSLLRRGIGVHHAGLLPIVKEVVEMLFCRGVIKVLFSTETFAMGVNAPARTVVFDSLRKFDGKEHRKLLPGEYIQMAGRAGRRGLDNIGTVIVMCRDEIPEESDLKNLIVGKPTRLESQFRLTYTMILHLLRVEELKVEDMLKRSFAEFHAQKNLPEKEKLLLQMLRQPTKTIECIKGEPAIEEYYEMVLEAEAHRESITEAIMQLPASQQSLTPGRLVVVKSQSDDDHLLGVIVKTPSAALKQYVVLVLTGDCTSSALAPDSSNQNEKEAGDFKQGYFVIPKGKRSMEDEYFSSVSTRKGSGVINIKLPYKGDASGMGFEVRAIENKEIMNICASKIKIDQVRLLEDPSKTVYSKTVQMLIKEQPDGNKYPAALDAIKDLKMKDMLLVENYYAYQRLLQKMSENKCHGCIKLKEHIALMKEQKVYKDQLNDLKYEMSDEALQQMPEFQGRIDVLKEIHYIDSDLVVQLKGRVACEMNSGEELISTECLFENQLDDLEPEEAVAIMSALVFQQRNTSEPSLTPKLADARKRIYDTAIRLGKLQREFKVPVDPEEYARDNLKFGLVEVVYEWAKGTPFADICELTDVSEGLIVRTIVRLDETCREFRNAASIMGNSALHKKMETASNAIKRDIVFAASLYVTGI

SEQ ID NO: 3958 - protein, 1281 aa, Oryza sativa Japonica Group
MLVPAWEPPFRRRRPPLSSSSSRQESQVWDPESVQMDMSDVFDSGTGGITPRMPGPAKDFVRGSVNSRPFRPGGLHDDAAAAAALEKAFPEGARNGDWVRELMSGGPAQVNPPGFRKGLDLGNLKEYKSHWKCYQDGERVDEQSTSSSNDTMDKYSVQFDDLFKIAWEEDSDDKVPREDHVQQLVGDEETNDVDKQNISKLQNASETIENLDIEKQKGGAQGDVSEPQSDLDQMLLSSVKDTSRDSSGSGDGSMAKEGKVWALVGGDEDIVTNFYKLVPDMAIEYPFELDKFQKEAIYYLQKGESVFVAAHTSAGKTVVAEYAFALATKHCTRAVYTAPIKTISNQKYRDFCGKFDVGLLTGDVSIRPEATCLIMTTEILRSMLYRGADIIRDIEWVIFDEVHYVNDAERGVVWEEVIIMLPKHINIVLLSATVPNTVEFADWIGRTKQKKIHVTSTNKRPVPLEHCLFYSGEVFKICEKDAFLTQGYREAKEVFKKKNSSKLGMKPGSKPGTTAVRAGTQGRNPDTSSRGRDQKNPKHHHASSSAAAVQQSTSGPRRSESSFWMPLINNLLKKSLVPVVIFCFSKNRCDRSAESMFGADLTSNSEKSEIRLFCDKAFSRLKGSDRNLPQVVGIQSLLRRGIGVHHAGLLPIVKEVVEMLFCRGVIKVLFSTETFAMGVNAPARTLKDLVVFDSLRKFDGKEHRKLLPGEYIQMAGRAGRRGLDNIGTVIVMCRDEIPEESDLKNLIVGKPTRLESQFRLTYTMILHLLRVEELKVEDMLKRSFAEFHAQKNLPEKEKLLLQMLRQPTKTIECIKGEPAIEEYYEMVLEAEAHRESITEAIMQLPASQQSLTPGRLVVVKSQSDDDHLLGVIVKTPSAALKQYVVLVLTGDCTSSALAPDSSNQNEKEAGDFKQGYFVIPKGKRSMEDEYFSSVSTRKGSGVINIKLPYKGDASGMGFEVRAIENKEIMNICASKIKIDQVRLLEDPSKTVYSKTVQMLIKEQPDGNKYPAALDAIKDLKMKDMLLVENYYAYQRLLQKMSENKCHGCIKLKEHIALMKEQKVYKDQLNDLKYEMSDEALQQMPEFQGRIDVLKEIHYIDSDLVVQLKGRVACEMNSGEELISTECLFENQLDDLEPEEAVAIMSALVFQQRNTSEPSLTPKLADARKRIYDTAIRLGKLQREFKVPVDPEEYARDNLKFGLVEVVYEWAKGTPFADICELTDVSEGLIVRTIVRLDETCREFRNAASIMGNSALHKKMETASNAIKRDIVFAASLYVTGI

SEQ ID NO: 3959 - protein, 323 aa, Sorghum bicolor
MARRSLAGDATAGAASRVRFAPTSNNLLVSSWDSGLRLYDADEGTLRVSAESEAALLDCCFEDESSAFACGSDGSVRRYDFHSGSQDTVGLHEDVLACIEFSSMTGQVMTGGLDKKIKLWDLKTRNVSPSGTIILDSDVASLSICGVYILAAVARNVYFYDMRNLTTPVNEKDCPLEYQIRCLHASPEWNAYVAGSVDGAVALKHLDRGTDRDLGYSFRCHPKSRNGRSNLVPVNCIAVHPCKKTFVTGDDEGCTIAWDARSKKKLIELPIYLGSVASIAYNHNGQLLAVASNYFREVDKEVIDHHQVFIETEEDFKGKSRVG

SEQ ID NO: 3960 - protein, 143 aa, Sorghum bicolor
MALAAIYNLFIINKSGGLIYYKDYGSAGRMDTNDSLRLASLWHSMHAISQQLSPTPGCNGIDLLQAHNFDLHCFQSLTGTKFFVVCETGAPNMEMLLKVIYELYTDFVLKNPFYEMEMPIRCELFDHNLAQVIQKDRVALLGR

SEQ ID NO: 3961 - protein, 143 aa, Zea mays
MALAAIYNLFIINKSGGLIYYKDYGSAGRMDTNDSLRLASLWHSMHAISQQLSPTPGCTGIDLLQAHNFDLHCFQSLTGTKFFVVCETGAPNMEMLLKVIYELYTDFVLKNPFYEMEMPIRCELFDHNLAQMIQKDRVALLGR

SEQ ID NO: 3962 - protein, 143 aa, Zea mays
MALAAIYNLFIINKSGGLIYYKDYGSAGRMDTNDSLRLASLWHSMHAISQQLSPTTGCTGIDLLQAHNFDLHCFQSLTGTKFFVVCETGAPNMEMLLKAIYELYTDFVLKNPFYEMEMPIRCELFDHNLAQVIQKDRVALLGR

SEQ ID NO: 3963 - protein, 143 aa, Zea mays
MALAAIYNLFIINKSGGLIYYKDYGSAGRMDTNDSLRLASLWHSMHAISQQLSPTTGCTGIDLLQAHNFDLHCFQSLTGTKFFVVCETGAPNVEMLLKAIYELYTDFVLKNPFYEMEMPIRCELFDHNLAQVIQKDRVALLGR

SEQ ID NO: 3964 - protein, 143 aa, Zea mays
MALAAIYNLFIINKSGGLIYYKDYGSAGRMDTNDSLRLASLWHSMHAISQQLSPTTGCTGIDLLQAHNFDLHCFQSLTGTKFFVVYETGAPNMEMLLKAIYELYTDFVLKNPFYEMEMPIRCELFDHNLAQVIQKDRVALLGR

SEQ ID NO: 3965 - protein, 143 aa, Oryza sativa Japonica Group
MALAAIYSLFIINKSGGLIYYKDYGSAGRTDTNDSLRLASLWHSMHAISQQLSPTPGCEGIDLLQAHNFDLHCFQSLTGTKFFAVCETGAQNIETLLKVIYELYTDFVLKNPFYEMEMPIRCELFDLNLAQVIQKDRVTLLGR

SEQ ID NO: 3966 - protein, 143 aa, Oryza sativa Japonica Group
MASAAIYSLFIINKSGGLIYYKDYGSAGRTDTNDSLRLASLWHSMHAISQQLSPTHGCEGIDLLQAHNFDLHCFQSLTGTKFFAVCETGAQNIETLLKVIYELYTDFVLKNPFYEMEMPIRCELFDLNLAQVIQKDRVTLLGR

SEQ ID NO: 3967 - protein, 141 aa, Ricinus communis
MAAIYSLYIINKSGGLIFYKDYGSGGRMDTNDSLRVASLWHSMHAISQQLSPVVGCSGIELLQADTFDLHCFQSLTGTKFFVVCEPGTPHMEALLKVIYELYTDYVLKNPFYEMEMPIRCELFDINVTQIIQKDRVALLGR

SEQ ID NO: 3968 - protein, 141 aa, Vitis vinifera
MAAIYSLYIINKSGGLIFYKDYGSAGRMDTNDSLRLASLWHSMHAISQQLSPTLGCSGIELLEADTFDLHCFQSLTGTKFFVVCEPGTQHMEGLLKVIYELYTDYVLKNPFYEMEMPIRCELFDINLSQAVQKDRVALLGR

SEQ ID NO: 3969 - protein, 141 aa, Populus trichocarpa
MAAIYSLYIINKSGGLIFYKDYGSSGRMDTNDSLRVASLWHSMHAISQQLSPTVGCLGIELLEADTFDLHCFQSLTGTKFFVVCEPGTQHMEGLLKVIYELYTDYVLKNPFYEMEMPIRCELFDINLSQAIQKDRVALLGR

SEQ ID NO: 3970 - DNA, 4848 bp, Canis familiaris
atgccggagccatcaaccaccgagggacggcgaatccagggagagctcaagaatctcctagaaggcgccgcggtccgacggaccgagagctctgcctcccgaaggcaggggtacccctcggaacctcatgccgcgacttcccgattcgtgcgggaagcctcggtctacactgggcgcacgcgcaacacagcgcctgcagccccgggtcgcctcagcaacgagcaccatcaccgcgaccgtcgggcccacctcgatgagagggtgcgccgaggctaccaccccaggcatgggggacgctacgacagcggggaggatcggagtccctcgcccgaaccacccggaacgcaggccttcagccgggccatacgacgggcgccgttcccgacccggttccgacccccgactactatcacaaagtactcaggggagacgagaccagaactgtggctcgcggactaccgtctggcctgccaactgggcggaacggacgatgacaacctcatcatccgcaacctccccctgttcctctccgacaccgctcgcgcctggttggagcacctgcctccggggcagatctccaactgggacgacctagtccaagctttcgccggcaatttccggggcacgtacgtgcgccccgggaattcctgggacctccgaagctgccgacagcagccgggagagtctctccgggactacatccggcgattctcgaagcagtgcaccgagctgcccaacatcaccgactcggatgtcatcggcgcgttcctcgccggcaccacctgccgcgacctggtgagcaagctgggtcgcaagacccccaccagggcgagcgagctgatggacatcgccaccaggtttgcctccggccaggaggcgcgcggcgccaagaagaagggcaagaagaagtcgcaagcgaaacgcgacgccgccgacgcggaccttgtcgccgtcgccgagtacaagaaccctcggaaaccccccggaggtgccaacctcttcgacaagatgctcaaggagctgtgcccctaccaccaggggcccgtcaagcacacccttgaggagtgcgtcatgcttcggcgctatagggccgggccacccgcggagggtgacagggcccgcgacgacgataagaaggaagatcaccaagcaggagagttccccgaggtccgcgattgcttcatgatctacggtgggcaagcggcgaatgcctcggctcgacaccgcaagcaagagcgccgggaggtctgctcggtgaaggtggcggcgccagcctatctagactggtccgacaagcccatcaccttcgaccgagccgatcaccccgaccatgtgccgagcccggggaaacacccgctcgtcgtcgaccccgtcatcggcgacgtcaggctcaccaaggtcctcatggacggaggcagcagcctcaacatcatctacgccgagaccctcgggctcctgcgtgtcgatctgtcctccgtccgagcaggcgctgcgcccttccatgggatcattcccgggaagcgcgtccagcccctcggacaactcgaccttcccgtctgcttcggaacaccctccaacttccgaagggagaccctgacgttcgaggtggtcgggttccgaggaacctaccacgcggtgctgggaagaccatgctacgcgaagttcatggccgtccccaactacacctacctgaagctcaagatgccgggccccaacggggtcatcaccgtcggccccacgtacaaacacgcgttcgaatgcgacgtggagtgcgtggagtacgccgaggccctcgccgagtccgaggccctcatcgccgacctggagagcctctcgaaggaggtgccagacgtgaagcgtcatgccggcaactttgagccagcggagacggttaaattcgtccccctcgaccccagcggcggcgcctccaagcagatccagatcggctccagggatgtcgtcgagcactcgctggacatccgagccggagcccgacccgtcaagcagcctctgcgccgattcgacgaggagaagcgcagagccataggcgaggagatccacaagctaatggcggcagggttcatcaaagaggtattccatcccgaatggcttgccaaccctgtgcttgtgagaaagaaaggggggaaatggcggatgtgtgtagactacactggtctcaacaaagcatgtccgaaggttccctaccctctgcctcgcatcgatcaaatcgtggattccactgctgggtgcgaaaccctgtctttcctcgatgcctactcagggtatcatcaaatcaggatgaaagagtccgaccagctcgcgacttctttcatcacaccctttggcatgtactgctatgtcaccatgccgttcggcatgaggaatgcgggcgcgacgtaccagcggtgcatgaaccatgtgttcggcgaacacattggccgcacggtcgaggcctacgtcgatgacatcgtagtcaagacgaggaaagcttccgacctcctttccgaccttgaagtgacattccgatgtctcaaggcgaaaggtgtcaagctcaatcccgagaagtgtgtcttcggggtgccccgaggcatgctcttggggttcatcgtctccgagcggggcatcgaagccaacccggagaagatcgcagccatcactagcatggggcccatcaaggacttgaaaggcgtacagagggtcatgggatgtctcgcggctctgagctgcttcatctcatgcctcggcgaaagaggtctacctctgtaccgcctcttgaggaaggccgagtgcttcacttggacccctgaggccgaggaagccctcgggaacctgaaggcgctcctcacaaaggcgcctatcttggtgcccccagctgccgaagaagccctcttggtctacgtcgccgcgaccactcaggtggttaacgccgcgattgtggtcgagaggcaagaagaggggcatgcattgcccgttcagaggccagtttacttcgtcagcgaggtactgtccgaaaccaagatccgctacccacaagttcagaagctgctttatgcggtgatcctgacacggcggaagttgcgacactacttcgagtctcatccggtaactgtggtgtcatccttccccctgggggagatcatccagtgccgagaggcctcggatgggattgcaaagtgggcggtggaaatcatgggcgagacaatctcgttcgcccctcgaaaggccatcaagtcccaggtcttggtggacttcgtggccgaatgggtcgacacccagctaccgacggctccgatccaaccagagctctggaccatgtttttcgacgggtcgttgatgaagacgggagccggcgcatgcctactcttcatctcgcccctcgggaagcacatacgctatgtgctacgcctccatttcccagcatccaacaatgtggctgagtacgaagctctggtcaacggattgcggatcgccatcgagctaggggttcgacgcctcgacgctagcggtgactcgcagctcgtcatcgaccaaatggaggcctattgcgatgaggttcggcgcttggaagacaagttctacgggctcgagctcaaccacatcgctcggcgctacaacgagactgcggacgagctggctaaaatagcctcggggcgaacaacggttccctcggacgtcttctcccgggatctgcatcgaccctccgtcaagatcgacgacacgcccgagctgaggcgagatgtgcacgtcgagggggagcaaagcggggtcacgcctgatcgaaactggcagaccccgtacctgcaatatctccaccgaggagagctacacctcgaccgagccgagctctaccaccgcagcccctctagcatcctccagcgatgcatctccatcgccgaaggtcaggaactcctgcgagagatacactcgggggcttgcggccatcacgcagcgcctcgagcccttgtcgggaatgcttttcgacaaggcttctactggcctacggcggtggccgacgctaccagaattgtccgcacctgcgaagggtgtcaattctacgcgaggcagacccacctgcccgctcaggctctgcagacgatacccatcacctggcctttcgctgtgtggggtctggatctcgtcggccccttgcagaaggcacccgggggctacacgcacctgctggtcgccatcgacaaattctccaagtggatcgaggtccgacccctgaacagcatcaggtccgagcaggcggtggcgttcttcaccaacatcatccatcgcttcggggtcccgaactccatcatcaccgacaacggcacccagttcaccggcagaaagttcctggacttctgcgaggatcaccacatccgggtggactgggccgccgtggctcatcccatgacgaatgggcaggtagagcgtgccaacggcatgattctacaagggctcaagcctcggatctacaacgacctcaacaagttcggcaagcggtggatgaaggaactcccctcggtggtctggagtctgaggacaacgccgagccgagccacgggcttcacgccgttctttctagtctatggggccgaagccatcttgcccacagacttagaatacggttccccgaggacgagggcctacaccgaccaaagcaaccaagctagccgagaagactcactggaccagctggaggaggctcgggacaaggccttactacactcggcgcggtaccagcagtctctgcgacgctaccacgcccgaggggtccggtcccgagacctccaggtgggcgacctagtgctttggctccgacaagatgcccgagggcggcagaagctcacgcccccctag

SEQ ID NO: 3971 - DNA, 1440 bp, Sorghum bicolor
atggacggcgacggcgcaaccaccaccacggccgtccaaggcggcggcggcggctcgcacgtcctgctcctgccgttccctgggatgcagggccacgcgaacccgatgctccagctcggccggcggctggccttccacggccttcgcccgacgctggtggtctcccgccacgtcctctccaccaccacctcggcctccaggtcgtcgtgcccgttccccgtggccgccatctcggacggcttcgacgccggcgggatctcgtcgtgcccggacgtcgcggagtacgtgcggcggatggaggccgcggggtcggagacgctggcggcgctcctggacgccgaacgccacgcggggcgggccgtccgggtgctggtgtacgactcgcacctgccgtgggcgcgccgcgtggcgcgggccgccggcgtggccgccgccgcgttcatgacgcagatgtgcgccgtggacctcgtctacggcgaggcgtgggccgggcgcgtggccctgccgctggcggacggcggggagctgcgccggagtgggaggctcgccgtggagctgggccccgacgacgtgccgccgttcgtggcggcgccccagtggtacccggccttcacggagtccgcgctgagccagttcgacgggctggagctcgccgacgacgtgctcgtcaactcgttccgcgacctggagccaacggaggcggattacctggcgtcgacgtggcgcgcgaagaccatcggcccgacgctgccgtcgttctacctcgacgacggccggctgccacggaacaagacgtacgggtacggcgtggacctcttctcgagcacggatcatcaggcgcaggcgccgccgtgcccgtgcatggcgtggctggacaagcaggagcccggctccgtcgtgctcgcgtcgtacgggaccgtggccaacctcgacgcggcgcagctcgaggagctgggcaacgggctgtgcgactccggcaagcctttcgtctgggtgctgaggtccgacgaggcagagaagctgtctcggcagctcggcggcaagtgcaaggagaagggcctcgttgtgcccttctgtcctcagcttgaggtgctggcacacaaggccacaggttgcttcctgacgcactgtgggtggaactcgacgatcgagtccatggccactggtgttccaatggcggcgatgccgcagtgggcggaccagccgacgacggccaagtatgtggagagcgcatgggggattggggtgcggatgcggaagggcttggtgaggagggaggaggtggagaggtgcatccgggaggtgatggaaggggagaggaaggatgagttcaggcagaacgcggcgagatggatgaagaaggccaaggaagcgatgcaggaaggagggagctctgacaagaacattgctgaatttgcagcaaagtatttgtcagtttaa

SEQ ID NO: 3972 - DNA, 1524 bp, Zea mays
aagcaatttcaattgcaagttgcaacgcgacgaatacggagccatggacgacggcgccgcaaccacaatcgtccaaggcggcgacgcgcacgtcctgctcctgccgttccctgggatgcagggccacgcgaacccgatgctccagcttggccggcggctggccttccacggcctgcgccccaccttggtggtctcccgccacgtcctctccaccacctccacctccaggtcgtgccccatccccgtggccgccatctcggacggcttcgacgacggcgggatctcctcatgcccggacaccgcggagtacgtgcgccggatggaggccgcggggtcggagacgctggcggggctcctggacgccgaggcccgcgcggggcggcccgtccgcgtgctggtgtacgactcgcacctgccatgggcgcgccgcgtggcgcgggccgccggcgtggccgccgccgcgttcatgacgcagatgtgcgcggtgggcctcgtctacggcgaggcgtgggccgggcgggtggccctgccactggcggacggggccgcgctgcgcgggaggctcgccgtggagctgggccccgacgacgtgccgccgttcgtggcggcgcccgagtggtacccggcgttcaccgagtccgcgctgagccagttcgacgggctggagcacgccgacgacgtgctcgtcaactcgttccgtgacctggagccaatggaagcggattacctggagtcgacgtggcgcgcgaagaccgtcggcccgacactgccgtcgttctacctcgacgacggccgcttgccatgcgacaagacatacggcgtggacctcttctcgagcatcgactccgaggcggcgccgtgcatgacgtggcttgacaagcaggagccctgctccgtcgtcctcgcgtcgtacgggaccgtcgccaacctcaacaaggagcagctggacgagctcggcaacggactgtgcgattccggcaagcctttcgtttgggtgctgaggtccaacgaggcagagaagctgtctcgacagctcggtggcaggtgcaaggagaggggcctcattgtccccttctgtcctcagctcgaggtgctggcacacaaggccacaggttgcttcctgacgcactgcgggtggaactcgacgattgaatccatcgctagtggtgttccaatggtggcgatgccgcagtgggcggaccagccgacgacggccaagtatgtggagagcgcgtgggggattggggtgcgcatgcggaagggttccttggtgaggaaggaggtggagaggtgcataagggaggtgatgggcggggagaggaagcatgtgtacgggaggaatgccgctcgttggatgcacaaggccaaggaggccatgcaggaaggaggaagctctgacaagaacattgcagaattcgcagccaagtatttaccaaagtagatttccgattatgttctcctcggataatgagttttttgggcaataaagtttcttgtctttagggccaaaaaaaaaaaaaaaaa

SEQ ID NO: 3973 - DNA, 1530 bp, Hordeum vulgare subsp. vulgare
gagccgagatcagtcagcagctcacgatggacgccgcggtcaccaccgtccagggcaccggcggccgcgtcctgctgctgccgttcccgggcatgcagggccacgccaaccccatgctgcagctcggccgccgcctcgcctaccacggcctccgccccaccctcgtcctcacccgccacgtcctctccaccacccccatctccaccacccaatgcccgttcccggtggccgccatctccgacggcttcgacgccggcggcatcgcctcgtgcgccgacacggccgagtacctgcgccggatggaggccgccgggtccgacacgctctcacggctcctcctcgccgacgacgaccccgtacgggtgctcgtgtacgattcgcacctgccgtgggcgcggcgcgtggcctgcgaggccggcgtggccgccgccgcgttcttcacgcagatgtgcgcggtggacgtggtctacggcgaggtcttcgccgggcgcgtcgcgctgccgctcgcggacgggagcgcgctccgggggaggctctccgtggagctcgggccggacgacgtgccgccgttcgtcgccgcgccgcagtggtacccggcgttcaccgagtcggcgctctcgcagttcgacgggctggaccaggccgaccacgtgctcgtcaactccttccgcgacctcgagccaatggaggctggttacatggaatcgaaatggggtgcaaagaccgtcggcccgacattgccatcattctaccttgaggatgaccgtctcccatcaaacaagacctatggcttcaacctcgtctcgagcagcgctctgtgcatggcatggcttgacaagcaggctccttgctccgtgctcctcgcatcctacggcacagtcgctaacctcgacacgacacaactagaggagctaggccatggattgtgcaactccagacaaccttttctttgggtgttgaggtccaacgaggcggataagttgccccaggagctccatgacaaatgcaacatgaaaggcctaattgtccccttttgccctcagctggaggtgttggctcatagagcaacaggttgtttcttgacgcattgtggatggaactccacaacggaagcaatcgtcgccggtgtacccatggtcgcaataccgcaatgggcagaccaaccaaccgccgcaaagtacgtggagaacgcatgggggatcggcctgcgtgcacgtcgagacgagaaaggcttggtgacaagggaggaggtggagaggtgcatcaaggaggtgatgggtagagaagagtataagagaaactcttgtatgtggatgcagaaggccaaagaggctatgcaggaaggagggagctctgacaataacattgcagattttgcagccaagtatttgtcaaatttagagataatcctaagttgttaggcctacactgaacgttttgagtctcttttgttgttaaaccgaacggttgctaatgaaccgctacttgttgagatatggaactatcaaaataagatgtctgattagtact

SEQ ID NO: 3974 - DNA, 2350 bp, Zea mays; identical to SEQ ID NO: 1563

SEQ ID NO: 3975 - DNA, 2193 bp, Zea mays
ttttgtttcgctggaaagccagagccggccaggaggaggagggccggtcacttggtgttggcggtggtggattccacttcctccggcgcgcgcggcagggccaggggctggccgtagaaacgtatcgccggaggagactgtcgtcgtcgtcgcctcatttatttgctagcttttgcgctggtttctgtccgagtgcgggatgtgtaagccaaaagaagctgcgtttcttggggatcgggcgctgtatataagcatgtgattcgcgcaagaagcagccgagaggagttgccagagcgtcaagtctggttcgccgcacggcgtcgcgacgccgacggtcatgtcggggaagacgacgccgacgaaggcgacgctgagccggccatgcgttctggtcatagtgatggcgggcgtggagaggttcgcgaacaagggggtggggtcgaacctggtgacgtacctcaccagcgtcgtgggcatgagcacggcggcggcggccaagagcgtcatcgcctggaacggcgtcagcttcatgctgccgctcgtcagcgccgtcctggctgactccgcccactgggaccgctactgcaccatcgccgcctcctccttgctctacgtcttgggaatggtagcgctcacgacatgggcgctgctggggacacggatgccgcgctccacgctcttcttcccgctctacctcatgtccatcgggcaaggcggataccagccttcgctgcaagcgttcggcgccgaccagctgagcatcggggacgacgacgacgacggtgacggcgacaccgagcccggcgcgtcgtcgacgccggaggagaaggccaaggtgaagagcatgttcttccggtggtggtacttcggcatgtgcagcggcagcctgctggggaactccaccatgtcgtacgtccaggacaacctgggctggggcctcggtttcgccatcccctgcgccgtcatggctctgtccgtcgcggcctttttctgctgcacccctctgtacaagcggcaccggcaggtgcagcagccgaagggcaccggtattaggccgtccccgagtagcgtcttcaacttcaagtcggttctcggcgctagccgaaagatcagtctgccgccgtcgagatcatcagacgacaatggcgacgccatttctgagcttgagttgcaagagaagccactgaaaactgatgaagcatcagagtcctcccctgacgaggctgccgctgctcccggcgtggccaaggtcatactcggcctcctgccgatctgggcgatcctgctcgtcttcgcggtgatcttccagcagccgatgaccttcttcaccaagcaaggcatgctgatgaaccacacgatcggcgtcggcgtcggctccggctccctggtgatcccgccggcgatgctgcagagctcgatcaccgtctccatcatcctgctcgtgcccatgtacgatcggatgatcgtcccgctgaccaacgccgtcacggggggcagcgacggcatcacggtgctccagcggatcggcgtcggcatggtcctctccgtggtggccatggtcgccgcggcgctcgtcgagtcgcggcggctccgcgcggagcccgccctgctgagcatcttctggctcctgccgcagtacgtcctgctgggggtctccgacgtgttcaccgtggtggggatgcaggagttcttctactcgcaggtgccggcctccatgaggaccaccggcatcgggctctacctcagcgtcttcggcgtcggcggattcctcggcgcgtccctcatcaccctgctcgagatggccacggcgaggcccggcaacgcccgcggatggttctctgacgacccgcgggaggcgcggatagataacttctactggttcttggctctcctctgcttcgtcagctttgtcgtcttcacgcacttgtgcaagtactacaacgacagatctgcgtcagggaggtaggatcgacccgagtaattaagctgggggtggacgagaggatcttcgatcttgattttgcttgacaccttgagtgaaaactcattacttgtattttcagggcgattctagctagagatagttcgtctgtgtaatgttttcagaaagacatgtaattcaggactctagacgtaatggttgtgttccaacacttgtacaaagcttgtcttgtgatttgataggcaaaagat

SEQ ID NO: 3976 - DNA, 1617 bp, Sorghum bicolor
atgtcggagaagacgccgccgccaacgacgacgacgacgaaggccgcgacgctgagccggccatgtgttctgatcatagcgatggcgggcgtggagaggttcgcgaacaaaggggtggggtcgaatctggtgacgtacctcaccggcgtggtggggatgagcacggcggcggcggccaagagcgtcatcgcctggaacggcgtcagcttcatgctgccgctcgtcagcgccatcctggccgactcctactgggacgaccgctactgcaccatcgccgtctcctccttgctctacgtcttgggaatggtagcactcaccacatgggcactgctgcggacacggatgcggcgctccacgctcttcttcccgctctacctgatgtccatcgggcaaggcggataccagccttcgctgcaagccttcggcgctgaccagcttagcatcggagacgacgacgacgacgacaccgagcccagcgccacgccggaggagaaggccaaggtgaagagcatgttcttccagtggtggtacttcggcatgtgcagcggaagcctgctggggaactccaccatgtcctacgtccaggacaacttcggctgggggctcggcttcgccatccccagcgccgtcatggccatctccgtcgcggcgttcttctgttgcacccctctgtacaagcagcagacgcaggcaaagggctccggtaataagccgtctccgaatagcgtcttcaaggtcctcaagtcgattcttgctagccgaaagatcagtctgccgtcgagagacgacaatggcgacgccgcttctgagcttgagttgcaagagaagccactgaaagctgaaccagcagatgatacaaaagagtcgtcactggatgatgaggctgctcctggcgtggccaaggtcatactcggcctcctgccaatctgggcgatcctgctcgtcttcgcggtgatcttccagcagccgatgacgttcttcaccaagcaggggatgctgatggaccacacgatcggcgtcggctccggctccttcgtgatcccgccagcgatgctccagagctcgatcaccgtctccatcatcctgctcgtgcccatgtacgacaggatgatcatcccgctgatcaacgccgtcaccgggggcagcgacggcatcacggtgctgcagcggatcggcgtcggcatggtcctctccgtcgtggccatggtcaccgcggcgctcgtcgagtcgtggcggctccgcgtggcacctgctgtccggctgaccatcttctggctcctgccgcagtacgtcctgctggggatctcggacgtgttcaccgtggtggggatgcaggagttcttctacacgcaggtgccggcctccatgaggaccaccggcatcgggctctacctcagcgtcttcggcgtcggcggcttcctcggcgcgttcctgatcaccgccctcgagatggccacggcgaggcccggcaacgcccggggatggttctctgacgacccgcgggaggcgcgcctagataacttctactggttcttggctcttctttgcttcatcagctttgtgatattcacgcacttgtgcaagtactacaatggcaaatctgcgtcagggaggtag

SEQ ID NO: 3977 - DNA, 1970 bp, Sorghum bicolor
acgagacaaagcagcttccccgcgcgcttccccaccccacacacctccgccggggacggacagcgaggccgaggaggcagaccaggcgggggcgtccgcggcggagatggggacgtacaagtgctgcatcttcttcacgcgcaggttcgcgctcgccgacacctccacgccggaggacgtccgcgcgctcttctcccgctacgccggcggctcgccgtacatgcttgccgacgacctccgccgctacctcgccgcctggggaggtgccgacggcgaggtcccggagcagatcatcgaccgtatcctgcaggatcgcagccgaaccccgcggttcgggaggccggcgctcaccgttgacgacttcttacacttcctcttctccgaggacctcaacccacccctccgccactccaaggtcaatcaggacatgaacgcaccgctatcgcactattttatatacactggacacaactcgtatctgaccggtaatcaactcagcagtgactgcagtgatgttcccatcatcaaggcactgcaaataggtgtccgtgtaattgaattggacatatggccaaattcttctaaagatgacattgatgttctccatggaaggacactgactgccccagtatcacttatcaaatgcttgagatccatcaaagaatatgcttttgttgcatctccctatcctgttattataacactagaagaccaccttacacctgatcttcaggcgaaagtagctaagatggtccttgaagtgtttggagacatcctgtattaccctgaatcgaaacatcttcaagaatttccttcacctgaagctctaaaggggcgtgtcatgctctcaacaaaacccccaaaggagtatctcgaagcaaagggtggcaccatgaaggagagagaaattgaggcccagtttaaaaagggtgaaagagaagaagcagcatggggagtagaagttccagatattcatgaggagatgcaagtcgcgaacaggaatgatgatgatctattataccgcgaaagaggtgcagatggtgatgatgagaagaaaacgaagcatgtggcagcagagtataaacaccttatcactatcaaggcaggaaagccaaagggtcctctcgtggatgccttaaagaacgatccagacaaagttaggcgactcagtttgagtgagcaagaacttgcaaaagttgcagcacgtcatggtcccaacattgtgagcttcacgcatagaaatatgctgagaatatacccaaagggaacccgcttcaattcatccaactataatccatttcttggctgggtgcatggtgctcaaatggtggcattcaatatgcagggacatggaagagcactttggttaatgcatggcttttataaagccaatggctgttgcggttatgtgaagaaaccagatttcttgatgcaaacttgtccagatggaaaggtgtttgatccggaggcagatttgccagtgaaggcaacattgaaggtcaaggtatacatgggggaaggttggcaaaaggacttcaagcagacacatttcgacacatactcacctccagatttttatgtaaaggttggcatcgccggagttccattagactcggtgatgaggaagacgaaagccgtggaagacagctgggtgccggtgtgggaggaggagttcaccttcccgctgaccgtaccggagatcgcggtgctccgcgtggaggtgcacgagcaggacgtgagcgaagacgacttcggcgggcagacggcgctgcctgtggcggagctgcggccagggatccgcgccgtgccgctgttcgaccacaaggggctcaagttcaggagcgtcaagctcctcatgtgcttcgagttcgcgtagcgtcctgcagcagaaaacgattatgctgccatgtgcgtcgatcgatgttcgtttgcaataggaatcgaccttttctttttactgttatattatt

SEQ ID NO: 3978 - DNA, 2038 bp, Digitaria sanguinalis
ccctccgctcatccatccgccctccgaaatcgccctccctgaaacctcgcggcgcgaaaaatgcccaaacgagacaaaggagctcgcccgcgcgtttccccaccccacacacctccgccggggacggagagcgaggccgagggggcagacgacgaggcgggggcgtcgtccgcggcggagatggggacgtacaagtgctgcatcttcttcacgcacaagttcgcgatcgacgacaccaccacgccggaggatgtgcgcacgctcttctcccgctactccggaggctcgccctacatgggccccgacgacctccgccgctacctcgccaactggggaggggccggcggcgaggtcgccgagcagatcgtcgaccgggtattgcaggaccgcagccgcaccccgcggttcgggaggcccgcgctcaccgtcgacgacttcatgcacttcctcttctccgaggatctcaacccgcccctccgccactccaaggtccaccaggacatgaacgcaccactatcgcactattttatacacactggacacaactcatatctgaccggtaatcaactcagcagtgactgcagtgatgtccccattatcaaggcacttcaactaggtgttcgtgtaattgaattggacatatggccaaattcttctaaagatgacattgatgttctccatggaaggacactgactgccccagtatcactaattaagtgcttgagatccatcaaacaatatgcttttgttgcatctccgtatcctgttattataacattagaagaccaccttacacctgatcttcaggcgaaagtagctcagatggttcttgaagtgtttggggacatgctatattaccctgaatcaaaacatcttcaagaatttccttcacctgaagctctaaaggggcgtgtcatgctctcaacaaaacccccaaaggagtaccttgaagcaaagggtggtaccataaaggatagagaaattgaacaccagtttaaaaagggagaaaaggaagaagcagcttggggagtagaagttccagatattcaggatgagatgaaagtagccgacagaaatgaagatgatatattatttcgagaaagaggtttggatgatgacgatgagcagaaaacgtgcaagcatgtggcaccagagtataaacacctcattactatcaaagctggaaagccaaagggtgctctcgtggatgccttaaaaaatgatcctgataaagttaggcgtctcagtttgagtgagcaagaacttgcaaaagtggcatcaaatcatggtcccaacattgtgagcttcacacatagaaatatgctgagaatatacccaaagggaacccgcttcaattcatccaactataatccatttcttggctgggtgcatggtgctcaaatggtggcattcaatatgcagggacacggtagagcactttggttaatgcatggttttttccaagccaatggaggctgcggttacgtgcagaaacctgatttcttgatgcaaacttgtccagatggaaaggtgtttgatcccaaggcagatttaccggtcaaggcaacattaaaggtcaaggtatacatgggcgaaggttggcacaaggacttcaagcagacacatttcgacacatactcacctccagatttctatgtagaggttggcatcgccggagttccattagactcggtgatgaggaagacgaaagccgtggaggataactgggtccccgtgtgggaggaggaattcgccttcccgctgactgtccctgagatcgcggtgctccgcgtggaggtgcacgagcaggatgtgagcgaggacgacttcggcgggcagacggcactgccggtcgaggagctgcggccggggatttgcgccgtcccgttgttcgatcacaaggggcacaagttcaacaacgtcaagctcctcatgcgcttcgagttcacctagcgtcctgtagcacagaacggctatgttgccatgtctgatgatcgatgcttgtttgcattaaaaaaaaaaaaaaaaaaaaaaaaaa

SEQ ID NO: 3979 - DNA, 1792 bp, Zea mays
ccacgccggaggatgtccgcgcgctcttttccctctacgccggcggctcgccgtacatgcttgccgacgacctccgccgctacctcgccgcctggggaggtgctgacggcgaggtcccggagcagatcatcgaccgtatcctgcaggatcgcagccgcaccccgcggttcgggaggccggcgctcaccgttgacgacttcttacacttcctcttctccgaggacctcaacccgcccctccgctactccaaggtccatcaggacatgaacgcgccgctatcgcactattttatatacactggacacaactcgtatctgaccggtaatcaactcagcagtgactgcagtgatgttcccatcatcaaggcacttcaattaggtgttcgtgtaattgaattggacatatggccaaattcttgtaaagatgacattgatgttctccatggaaggacactcactgccccagtatcacttatcaaatgcttgagatccatcaaagaatatgcttttgttgcatctccctatcctgttattataactctagaagaccaccttacacctgatcttcaggagagagtagctaagatggtccttgaagtgtttggagacatcctgtattaccctgaatcgaaacatcttcaagaatttccttcacctgaagctctaaaggggcgtgtcatgctgtcaacaaaacccccaaaggagtatctcgaagcaaagggtgacaccatgaaggagaaagaaattgaggcccggattaaaaggggagaaagggaagcagcagcatggggagtagaagttccagatattcaggatgagatgcaagtcgccgacaaggatgaagatgagctattataccgcgaaagaggtgcagatggcgatgatgggaaggaaacaaagcatgttgcagcagagtacaaacacctcatcactatcaaggcaggaaagccaaagggtcctctcgtggatgccataaagaacgatccagacaaagttaggcgactcagtttgagcgagcaagagcttgcaaaagttgcagcacatcatggtcccaacattgtgagtttcacgcatagaaatatgctgagaatatacccaaagggaacccgcttcaattcatccaactataatccatttcttggctgggtgcatggtgctcaaatggtggcattcaatatgcagggatatggaagagcactttggttaatgcatggtttttataaagccaatggcggttgcggttacgtgaaaaaaccagatttcttgatgcaaacttgtccagatggaaaggtgtttgattcgaaggcagatttgccggtgaaggcaacattgaaggtcaaggtgtacatgggggaaggttggcaaaaggacttcaagcagacacatttcgactcatactcacctccagatttttatgtaaaggttggcatcgccggagttccattagactcggtgatgagaaagacgaaagccgtggaggacagctgggtgccggtgtgggaggaagagttcgccttcccgctgaccgtacctgagatcgcggtactccgcgtggaggtgcacgagcaggacgtgaacgaagacgacttcggcgggcagacggcgctgcctgtggcggagctgcggccagggatccgcgccgtgccgctgttcgaccacaaggggctcaagttcaagagcgtcaaggtcctcatgagcttcgagttcgcgtagcgtcccgcagcgtaaagcgattatgctgtcatgtgcgtcgatcgatgtttgtttgcaataagaatcgactttttttcctc

SEQ ID NO: 3980 - DNA, 1785 bp, Oryza sativa Japonica Group
atggggacgtacaagtgctgcatcttcttcacccgcaggttcgcgctgagcgacgcgtccacgccgggcgacgtgcgcatgctgttcacccgccacgccggcggcgcgccctacatgggcatcgacgagctccggcgctacctcgccgccagcggggaggcccacgtcgacgccgacacggcggagcggatcatcgaccgggtcctgcaggagcgcagccgcaccccgcgcttcgggaagccgtcgctcaccatcgacgatttccagtacttcctcttctccgaggacctcaacccgcccatctgccattccaaggaagtccatcacgacatgaatgcaccattatcgcactacttcatatacactggacacaactcgtatctgacgggcaatcaacttagcagtgactgcagtgatattcccatcattaaggcactgcaaataggcgtccgtgtaattgaactggacatgtggccaaattcttctaaagatgatgttgatattctccatggaaggacactgactgccccagtatcacttatcaaatgcttgaaatccatcaaagaatatgcctttgttgcgtctccctaccctgttattataacattagaagaccaccttacatctgatcttcaggcgaaagtagctaagatggttcttgaagtatttggagataccctatattatcccgagtcaaaacatcttcaagaatttccttcacccgaagcactgaggggacgtgtcatcctctcaacaaaacccccaaaggagtaccttgaatcaaaaggtggtactatgaaagacagagacattgagcctcagtttagcaaaggacaaaatgaagaagctgtctggggaacagaagtcccagatattcaggatgagatgcaaaccgccgacaagcagcatgagaatgatatactatacacccaaagagatgtggaagaagatgatgagaagaaaatgtgccagcatcacccactagagtataaacaccttattactattaaggcaggaaagccaaagggtgctgtagttgatgccttaaagggtgatccagataaagttagacgcctcagtttgagtgagcaggaacttgcaaaagtggcagcgcatcatggtcgtaacatcgtgagctttacacataaaaatcttctgagaatatacccaaagggcactcgcttcaattcttcgaactataatccgtttcttggttgggtgcatggtgcacaaatggtggcatttaatatgcaggggtatggaagatctctttggctaatgcacggattctacaaggccaacggtggctgcggttatgtgaagaagccagatttcatgatgcaaacttgtccagatggaaatgtttttgacccgaaagcagatttacctgtgaagaaaacactcaaggtcaaagtatacatgggcgaaggttggcagagcgacttcaagcagacatacttcgacacgtattcccctccagacttctacgcaaaggtgggcattgccggggttccgtcggactcggtgatgcagaagacgaaagccgtggaggacagctgggttcccgtgtgggaggaggagttcgtgttcccgctgaccgtcccggagatcgcgctgctccgcgtggaggtgcacgagtacgacgtgagcgaggacgacttcggcgggcagacggcgctcccggtgtcggagctgcggccggggatccgcaccgtgccgctcttcgaccacaaggggctcaagttcaagagcgtcaagctcctcatgcggttcgagttcgtctag

SEQ ID NO: 3981 - DNA, 1919 bp, Zea mays
ctccacgccggaggatgtccgcgcgctcttttccctctacgccggcggctcgccgtacatgcttgccgacgacctccgccgctacctcgccgcctggggaggtgctgacggcgaggtcccggagcagatcatcgaccgtatcctgcaggatcgcagccgcaccccgcggttcgggaggccggcgctcaccgttgacgacttcttacacttcctcttctccgaggacctcaacccgcccctccgctactccaaggtccatcaggacatgaacgcgccgctatcgcactattttatatacactggacacaactcgtatctgaccggtaatcaactcagcagtgactgcagtgatgttcccatcatcaaggcacttcaattaggtgttcgtgtaattgaattggacatatggccaaattcttgtaaagatgacattgatgttctccatggaaggacactcactgccccagtatcacttatcaaatgcttgagatccatcaaagaatatgcttttgttgcatctccctatcctgttattataactctagaagaccaccttacacctgatcttcaggagagagtagctaagatggtccttgaagtgtttggagacatcctgtattaccctgaatcgaaacatcttcaagaatttccttcacctgaagctctaaaggggcgtgtcatgctgtcaacaaaacccccaaaggagtatctcgaagcaaagggtgacaccatgaaggagaaagaaattgaggcccggattaaaaggggagaaagggaagcagcagcatggggagtagaagttccagatattcaggatgagatgcaagtcgccgacaaggatgaagatgagctattataccgcgaaagaggtgcagatggcgatgatgggaaggaaacaaagcatgttgcagcagagtacaaacacctcatcactatcaaggcaggaaagccaaagggtcctctcgtggatgccataaagaacgatccagacaaagttaggcgactcagtttgagcgagcaagagcttgcaaaagttgcagcacatcatggtcccaacattgtgagtttcacgcatagaaatatgctgagaatatacccaaagggaacccgcttcaattcatccaactataatccatttcttggctgggtgcatggtgctcaaatggtggcattcaatatgcagggatatggaagagcactttggttaatgcatggtttttataaagccaatggcggttgcggttacgtgaaaaaaccagatttcttgatgcaaacttgtccagatggaaaggtgtttgattcgaaggcagatttgccggtgaaggcaacattgaaggtcaaggtgtacatgggggaaggttggcaaaaggacttcaagcagacacatttcgactcatactcacctccagatttttatgtaaaggtctgttcactcgttgagcccgtgccaacgtttagaagtcagcgatgcctatagatcgtccgaagcagtcacgccaggactggaacatgagggcgcatcgctaatttggttcggttcgccaacaggttggcatcgccggagttccattagactcggtgatgagaaagacgaaagccgtggaggacagctgggtgccggtgtgggaggaagagttcgccttcccgctgaccgtacctgagatcgcggtactccgcgtggaggtgcacgagcaggacgtgaacgaagacgacttcggcgggcagacggcgctgcctgtggcggagctgcggccagggatccgcgccgtgccgctgttcgaccacaaggggctcaagttcaagagcgtcaaggtcctcatgagcttcgagttcgcgtagcgtcccgcagcgtaaagcgattatgctgtcatgtgcgtcgatcgatgtttgtttgcaataagaatcgactttttttcctc

SEQ ID NO: 3982 - DNA, 2186 bp, Oryza sativa Japonica Group
ggtccatcacgacatgaatgcaccattatcgcactacttcatatacactggacacaactcgtatctgacgggcaatcaacttagcagtgactgcagtgatattcccatcattaaggcactgcaaataggcgtccgtgtaattgaactggacatgtggccaaattcttctaaagatgatgttgatattctccatggaaggtatgcatgagaattgctcacttgaagacatttttgttctgcactggaggccattcgatatgctatgaccttattccaaactatttgcttctttggtaggacactgactgccccagtatcacttatcaaatgcttgaaatccatcaaagaatatgcctttgttgcgtctccctaccctgttattataacattagaagaccaccttacatctgatcttcaggcgaaagtagctaaggtaattgcattttcctcgtatgatcaataatttggtgcagttgattctgttgtagctagttatgaaattttctttagatggttcttgaagtatttggagataccctatattatcccgagtcaaaacatcttcaagaatttccttcacccgaagcactgaggggacgtgtcatcctctcaacaaaacccccaaaggagtaccttgaatcaaaaggtggtactatgaaagacagagacattgagcctcagtttagcaaaggacaaaatgaagaagctgtctggggaacagaagtcccagatattcaggatgagatgcaaaccgccgacaaggttctactggttttaacatttgttgtttcttgtttcttagcatatggtgtatgtccatcactgttgtattggctttattccctagcagcatgagaatgatatactatacacccaaagagatgtggaagaagatgatgagaagaaaatgtgccagcatcacccactagagtataaacaccttattactattaaggcaggaaagccaaagggtgctgtagttgatgccttaaagggtgatccagataaagttagacgcctcagtttgagtgagcaggaacttgcaaaagtggcagcgcatcatggtcgtaacatcgtgaggttcgtttagcaaatatactgaatttcgtagcaaagtattttctatcattgcaccagagctctctatgtccattgaccttaacttcattctgtttattcaaagcagctttacacataaaaatcttctgagaatatacccaaagggcactcgcttcaattcttcgaactataatccgtttcttggttgggtgcatggtgcacaaatggtggcatttaatatgcaggtacatttctaacatgacactcctctgctacatcatattggcctgaatgcctgatacatttttcttcgcaggggtatggaagatctctttggctaatgcacggattctacaaggccaacggtggctgcggttatgtgaagaagccagatttcatgatgcaaacttgtccagatggaaatgtttttgacccgaaagcagatttacctgtgaagaaaacactcaaggtaggtttgtggcatatgtttcttcctttcattttcatctctgaaattcaggaatcgagctacttacagcttgcctgtttgtctaccaggtcaaagtatacatgggcgaaggttggcagagcgacttcaagcagacatacttcgacacgtattcccctccagacttctacgcaaaggtacatcgaattttacgctgatgccaaacgccaacaaatttgcaaatgcaaaacggagctttgaaaaaacatgtatatatgtataacttttacatatggagtgagatgaagacaaactttatatcaaaattgtagagctccatgagttctacgacgttcttattgactagtccatcgttccatcatcataacaggtgggcattgccggggttccgtcggactcggtgatgcagaagacgaaagccgtggaggacagctgggttcccgtgtgggaggaggagttcgtgttcccgctgaccgtcccggagatcgcgctgctccgcgtggaggtgcacgagtacgacgtgagcgaggacgacttcggcgggcagacggcgctcccggtgtcggagctgcggccggggatccgcaccgtgccgctcttcgaccacaaggggctcaagttcaagagcgtcaagctcctcatgcggttcgagttcgtc

SEQ ID NO: 3983 - DNA, 2282 bp, Sorghum bicolor
atcccttggcagccccgctctgacgtggtcctgtatctagcagtctctctctctctctccttcctcgggtcgggtcgggtgtcggtcggccggccggccggctcccccaattctctctattcctcttcctcagagttcctctagtctagcttcctattgagaggccccgccccgccccgcctcgcctagggacgttggttcctctccgtccgcagcactcccaccaccatgggcaccacgtacaagtgctgcctcatcttcaagcgccggttccacgcccgcgacgcgccgccgcccgaggacgtccgcgccctcttctccctccacaccggcgggggtacccacatgggcgccgacggcctgcgacgctacctggacgccacacaggaggaggcgtcgcggctggacgacgccgaggtggagcggctgctggagcagatccgcctgcagcagcaccagggcggccaccgcgcccgcctcccgcgcctggcccgcccgctcctcgccctcgacgacttccaccgctacctcttctcgcacgacctcaacccgcccctccgacaccaccaggtgcaccacgacatgacgcgcccgctctcccactacttcatctacaccggacacaactcctacctcaccggcaaccagctcagcagcgactgcagcgacgtccccatcatcaaggcgctgcagagaggggtcagggtcatcgagctcgacatgtggccaaattcaacaaaggacgacatcaacatcctgcacggaaggacactgaccaccccagtttcgctcatcaaatgcttgatatccatcaaagaatatgcctttgttgcatctccctatcctgtcatcataacgcttgaagaccaccttccctctgaactccaggaaaaagttgccaagatggttcttgatgtatttggtgacatactgtactacccgcctgactccgatcacctcaaagaattcccatcacctgaacaactcaagggccgtgtcctcctctcaacaaagccccccaaggagtaccttgaagccaaggctgatgacaccatgaaagagggtgatgctgacctccatcttgccaaaggggctaatgatgatgccgcgtggggaaaagaagtaccggattttcagactgagatccagtccgcaaaaaagcacgacgatgatgccccaggacaccaaagagaagatgatgacgacgacgatgatgaggaggaagaacagaaaatgcaaccacatttagctccacagtataaacaccttatcacaatcagagcagggaagccaaaaggctctctagctgatgccttgaagagtgatccagaaaaagttaggcgtctcagtttgagcgagcaacaacttgccaaagtggcagaggatcacgccacagaaattgtgaggttcacgcagaggaacatattgaggatatacccgaagggcactcgagtcacttcatctaactacaacccgtttattggttgggtgcatggtgctcaaatggtggcattcaatatgcagggatatggaagagcgctttggctaatgcacggattttataaagcgaacggtgggtgcggttatgtgaagaagccagatttcttgatgcagacagaaccacaagtctttgacccaagagaaccccaacctgtgaagaaaaccttgaaggtgaaggtgtacatgggcgatgggtggcgaatggacttcaagcagacacacttcgatcaatattctcctccagatttctacacacgggttgggatcgctggggtcccagcagactcggtgatgaagaagaccaaggctatcgaggacaactggatgccggtgtgggaggaggagttcagcttcccgctgacggtcccggagatcgctctgctgcgggtggaagtgcacgagtacgacatgtcggagaaggacgacttcggtggacagacggtgctgccggtgtcggagctgcggccggggatccgggcggtggcgctcttcgaccgcaaagggaacaagtacaacaacgtgaagcttctcatgcgtttcgagtttgcctagcctgatgtcttaccgtgagtgagacgacgattgcattgattgatatatacattccatattattatgtatcttgtgtgaacattgcaacctgagcgtgctttgtacatagatagattgcttggattggatgatatgtgcaacacttgatcagcaaacaattccttccgttccgttgttatgatcaaataataataaggcagcgtccttatgaataaattaaattaaaccca

SEQ ID NO: 3984 - DNA, 1698 bp, Zea mays
aaaaaacatttctcgaaccatataaatccagaaaccacccccgtgatttcgaaaatccaatctcgagctccctttccctctccactgcgactgcagcgtgctcctgtcctcgattctcgaagcctgtatccgtctgtcgagccatggcgaagggaagggcacacccgtcgaagcgacccacccaccaacttatcctcgcggctgtcctatccgtttccgttctcctcccgctgctcgtgccggcggcggcaactgtggctgtggcggtggcggaggggggcgggaagcagttggcggtcgggaaggacgagggaaaactggtcgcggagggggatgctggtggaggcgggttagtggaggagaatgagttcgcgggtggcttcggctccctcgacagcatgctgcagtgggcgatcggaaattctgatccggagaagctgaaagagggggcggttgatgtgcagaagttatctgcagatgaactgctcgagcggcgtcaggagattaaggagttgatggagaagttaaagatgccatcagacgctgacttaatgaaaatcgcaattgatgacttaaataattcttccatttcactggaggatcgccaacgcgcactgcaggaacttttagttcttgttgagcccattgacaatgctaatgatcttgaaaaacttggagggctccttcctgtgattcaagagcttaataatgcaaatgaagaaatacggaccacctctgcatgggtccttggtacagccagtcagaataatgaacttgtacaaaaccagatccttggttatggagctttggcgaggttggtgaagatgggttattccacatctacagaagaagctgcaaaagcattgtatgctatatcatctttgatcagaaataatgtaaatggtcaagaagcattccattcagaaaatgggagtgcaatgttgcagcacatattggtcagcaacaatattgatgttaggctacagaagaaggcagtgtttttagtaacagatttggcagactttcagctaaattccggaatcgcgcaacttcctttcttgagtgaccgtctttttctgaagtcaatagtcgatatgttatcaaggtttgacctagaccttcatgaaaaagtattattggccatcaagagtctgctgaaactttcctcaactgatgtggaggattttgagttctatgatctcgatagtgtactgctcagactaggggtacagttggaggacttgacaccagaggatcaaaaggagttcgctgtggaggttgatgccctccggagagaagttcaaacactcttccaacagaagctcaagcagggtaaagcgacctcgacatgatgttcggatgaccaccagaagatttgcccgtctagatggaagtagaatggatcagcttttgcgggatgctacagctagatggcggacttgggttttcttcttgcagtattcgagaaccatcagtcggaggggtcgggtggatgcacttcggcaaggtacatgatggcatgataggttaggaagtaaggcacgtgcttatgactccattttggcaaaactatatgattctcgcaacgttctgtgatatcggcactgcaacgaaggattttttccccttgttccgttgcagctgtagcttcattttgagaatgattgaacttgatgttgatcaaaaaaaaaaaaaaaa

SEQ ID NO: 3985 - DNA, 1560 bp, Zea mays
gcgactgcagcgtgctcctgttctcgattctcgaagcctgtatccgtctgtcgagccatggcgaagggaagggcacacccgtcgaagcgacccacccaccaacttctcgcggctgtcctatccgttttcgttctcctcccgctgctcgtgccggcggcggcaactgtggctgtggcggtggcggtggcggaggggggcgggaagcagttggcggtcgggaaggacgagggaaaactggtctcggagggggatgctggtggaggcgggttagtggaggagaatgaattcgcgggtggctttggctccctcgacagcatgctgcagtgggcgatcggaaattctgatccggagaagctgaaagagggggctgctgatgtgcagaagttatctgcagatgaactgctcgagcggcgtcaggagatcaaggagttgatggagaagttaaagatgccatcagacgctgacttaatgaaaatcgcaattgatgacttaaataattcttccatttcactggaggatcgccaacgcgcactgcaggaacttttagttcttgttgagcccattgacaatgctaatgatcttgaaaaacttgggggcctccttcctgtgattcaagagcttaataatgcaaatgaagaaatacggaccacctctgcatgggtccttggtacagccagtcagaataatgaacttgtacaaaaccagatccttggttatggagctttggtgaggttggtgaagatgggttattccacatctacagaagaagctgcaaaagcattgtatgctatatcatctttgatcagaaataatgtaaatggtcaagaagcattccattcagaaaacgggagtgcaatgttgcagcacatattggtcagcaacaatattgatgttaggctacagaagaaggcagtgtttttagtaacagatttggcagactttcagctaaattccggaatcgcgcaacttcctttcttgagtgaccgtctttttctgaagtcaatagtcgatatgttatcaaggtttgacctagaccttcacgaaaaagtattattggccatcaagagtctgctgaaactttcctcaactgatgtggaggattttgagttctatgatctcgatagtgtactgctcagactaggggtacagttggaggacttgacaccagaggatcaaaaggagttcgctgtggaggttgatgccctccggagagaagttcaaacactcttccaacagaagctcaagcagggtaaagcgacctcgacatgatgttcggatgaccaccagaagatttgcccgtctagatggaagtagaatggatcagcttttgtgggatgctacagctagatggcggacttgggttttcttcttgcactttggcaaggtacatgagggcatgataggttaggaagtaaggcacgtgcttatgactccattttggcaaaactatatgattctcgcaacgttctgtgatatgggcactgcaacgaaggaattttttttccttgttccgttgcagctgtagcttcattttgagaatgattgaacttgatgttgatc

SEQ ID NO: 3986 - DNA, 1819 bp, Sorghum bicolor
tcgaaaatccaatctcgagctccctttccctctccactgcggcgccggctgctgctccagtcggctctcgaagcctctgtccgtctgtcgagccatggcgaagggaagggctcaccattcgaagcgacccacccaccaactactcctcgcggctgtcctatccgtctccgttctcctcccgctgttcgtgccggcggcagcaaccgtggcggtggcggagggggacggtgtgtcggcgctcggcggcgggaagccgttggcggtcgggaaggacgaggggaagctggtcgcggagggggatgctggtggaggcgggtcggtggaggaggacgagttcgcgggtggcttcggctccctcgacagcatgctgcagtgggcgatcggaaattctgacccagagaaactgaaagaggaggcggctgatgcgcagaagttatctgaagatgaactgctcaagcggcgtcaggagatcaaggagttgatggagaagttaaagatgccatcagatgctgacttaatgaaaattgcaattgatgacttaaataattcctccatttcactggaggatcgccaacgcgcactgcaggaacttttagttcttgttgagcccattgacaatgctaatgatcttgacaaacttgggggcctccttcctgtgattcaagagcttagtaacgcaaatgaagaaatacggaccacctctgcatgggtccttggtacagccagtcagaacaacgaacttgtacaaaaccagatccttggttacggagctttggcaaggttggtgaagatgggttattccacatctgcagaagaagctgcaaaagcattgtatgctatatcatctttgatcagaaataatgtaaatggtcaagaggcattccattcagaaaatggcagtgcaatgttgcagcacatattggtcagcaacaatattgatgttaggctacagaagaaggtagtgtttttagtaacagatttggcggactttcagctaaattctggaattgtgcagcttcctttcttgagtgaacgtctttttctgaagtcaataatggatatgttatcaaggtttgacctagaccttcaggaaaaggttttattggccattaagaatctattgaaactttcctcaactgatgtggaggattttgagttctgtgatctcagtaatgtactgctcagactaggggtacagttggaggacttgacaccagaggatcaaaaggagttcgctgtggaggttgatgccctccggagagaagttcaaacgctcttccaacagaagctcaagcagggtaaagcgaccgtggcatgatatgcggatgaccaccagaagatttgcccttctaaatggaaatttaatggatcatcttttgtgggatactacagttagatggtgggcttgggttttctccgtgcaattttcaagaaccattcagtcgaaggggtcgggtggatgcacttcggcaaggttgtgtagtatatgatggcatgacaggttaggaagtaaggcacgtgcttatgatgactccattttggcaaactaattatgcttctcacaaagttctgtgatatgggcactgcaacgaagcatttttttttccttgttccgttgcagcggtagcttcgttttgagaatgattggatttgttgatcagatcatttgcgatgaatctaaattgagatctctgtgtaagtgtcttaacaggggagcggaggattggttctgaatccctggctgtatctagtctagcttctgtttgctgtatcacacgtgtgtcatagctagaagtgctggaacaaaacagtccatgac

SEQ ID NO: 3987 - DNA, 1586 bp, Oryza sativa Japonica Group
gaatttcgaagaccttctccctctccacctcgctcctctctcctctcgtggccatggcgatggcagcaagggcgcgctgctcgaggcaacccaactcccatcgcctcctcgccgtggttgtcctcgccgctattctgctccttccggtggcctccgcggcggcggcggtggtggcggcggtggcggagggggacggggtggagaaccggtcggcggcgaggcagtgggcgacggggaaggacgagggggagctggtctccggggaggagtcgaggggaggtgggtcggtggtggaggacgagttcgcgggtgggttcggctccctcgacagcatgctgcagtgggcgatcggaaattctgatccggataagttgaaagaacaggcagagggtgtgcagaaattgtctgcagatgagctgctcaagcggcgaatggagatcaaggagttgatggagaaattaaagatgccgtcagatgctgacttaatgaagattgcaattgctgacttaaataattcttccatttcactggaggatcggcagcgtgcactgcaggaactattaattctcgttgagcccattgacaatgctaatgatcttgacaaactaggaggcctcgttgctgtgattcaagatcttaataatgcaaatgaagaaataaggaccacttctgcatgggtcctgggtaaagccagtcagaataatgcccttgtccaaaatcagatcctaggttatggagctttggcaagattagtgaagatgggctatgcaacttctgcagaagaagctacaaaggcgctgtatgctatatccgctttggttagagacaatataaatggtcaggaggcatttcattcagaaaatggaagtgcaatgttgcagcacatattggcgagtaatagtgttgacgttcggcttcagaagaaggcagtgtttctagtgacagatctagcagattttcagctaaattctggaaattcaggacttcctttcttaagtgaccgtatttttcttaagtcattggttgatatgctgtcaagatttgacctcgaccttcaagaaaaggttttgttggctatcaagagcctactgaagctttcatccactgaagccacagatttcgagtcctgtgacctcagcagtgtactgtacagattgggcgtgcagttggaggagttgccatcagaagagcaaaaagagtatgctggggaggtggatgacctccggagagaagtccaaattctgttccaagacaagctcaaagagggcacaaagactgcattgtgatgatattaggacgaattaacgacggatgtagtatgcaatggaggcattaaatttttcaggagtatagttgatgtttggggccattcttgcagtgatcagaatcctcagaggatcaaatggagtcatggaatatttatctgtggatcttcggccaggtggtgacatagtgtctgtaggatttgatgtaatcgtaggttaggattattaactgtatggcttcttttcctgaagctacctatggttaattcatcattccctgcactatattttaaccactgcaatgaagcaaattttcccctt

SEQ ID NO: 3988 - DNA, 1664 bp, Hordeum vulgare subsp. vulgare
ggaagattccaaacagcaaaaaaataaaaaataaaagaaccctcttccctccccacttctgctgctccatggccatggcgaaggcgagaccgcgctcggcgcgatccagtcaccgccgctgcaacctcctcctctctgttgccctcctgtcggcgcttctcctccttccggcggcgacggcctccgcggcggtggcggtggcggtggcggcggagggggacgaggagaacaggtcgcgcggggcggcgacgcagtgggcgacggggaaggacgagggggagctggccgcggagcgggaggccgctggcgaggggtctgtggtggaggacgactttgcgggcggcttcggctccctcgacagcatgctgcagtgggccatcgggaattcggatccaggaaggctgaaagaagaagcggcggatgtgcagaagttatctgaggatgagcttctcaagcggcggcatgagattaaggacttgatggagaagttaaagatgccatcagacgctgacttaatgaagattgcaattgctgacttaaacaatgcttccatttcactggaggatcgccagcgtgcattgcaagagcttttaattcttgttgagcccattgataatgccaatgaccttgacaaaattgggggccttgttcctgtgattcaagatcttaataatgcaaatgaagaaatacggaccacctctgcatggatcctgggtacagccagtcagaataatgcccttgtccaaagccagattcttggttatggggctttggcaagattagtgaagatgggttattccacttcgacaaaagaagctgcaaaggcaatgtatgctatatcggctttaatcagaaataacgtaaatggtcaggaggcattcgctttggaaaatgggaacgcaatgctgcagcacatcttgggaagcaacagtgttgatgttgggcttcagaagaaggcagtgtttttattaacagatctagcggactttcagctaaattctggaaactcagggctcactttcttaagtgaacgcgttttgctgaagtcagtcactgatatgttatcagagtttgatcttgaccttcaagaaaaggttttgttggccattaggagcctactgaagcttccctcgacagacgccagggacttcgagtcatgcggtctagacagtgttctgtacagactgggggtgcagctggaggagctgccttcagaggaccagaaggagtatgccggggaggttgacgccctccggagagaagtgttgatgttcttccaacagaagctcaagccgggtaccgctgccgcggcggcgttatagacagcacacacggatgaagggaagggaagcagcctgccgagttttcgatccagtgactcagtgctggttgccaagtttttgaaagagtagattattttccgaaagagtctgtctgccgagttgagtcccctcttactcttgcaggagggttaatgggttatagtgctgtgggattggatggatagataggttagacacttgataagatatggttagttttcccattcgcaggactagttacgacatctgctgtgttacttggaaggttttccttttactggaggaagagacgatgatcttccctgttgtgtagctcctacaatgaatcaatgactttgttgg

SEQ ID NO: 3989 - DNA, 1835 bp, Zea mays
cgcaacgcagcggcaaaagcgacactgccagcagcgagcgggtggaaccagaccagaccagacatgtcgacgacggagccgctcctctcggccggcgccgagaagaagaagggcggcaagggtccgcgcgtgggcatcgacgaggcgctgtcggcgcacgcgggggagttcgggcggtggcagctgcggcacttcgtggccgtgtcggcggcgtgggcgctcgaggcgctgcacaccatggtgatcatcttcgcggaccgggagccggcgaccgtgccggtgccctgcgccgccgccgggcgggagtgggccggtggcggcggttcaggcgccgctgcgtcgaccgtcgtcgagtggggcctcgtctgcggccagcgctacaaggtcggcctcgcccaggccgtcttcttcgccggctgcatgatcggcgcgggcgtgttcggccacctgtcggactcgttcctgggccggaagggggcgctgcaggtggtgtgcgtgctcaacgccgccttcggcctcctcaccgcgctgtccccgaactactgggcctacgcggcgctgcgcctcctcacgggcttcagcgcggggagcgtgggcgtgctggccttcgtcctggccaccgagcccgtcggccccgcccgccgcggcgccgcgggcatgtccaccttctacttcttctccggcggcatcgcggcgctcgcggccgtcgcggcgctcttccagggctcctggcgcgcgctctacgccgtcacctcgctcccctcgctcgtcttcgccgtcgccgtcgtgccgttcttcgtctccgagtcgccgcggtggtacctcgtgcgccgccgccccgacgacgccctgcgggtcatccgcgccatcgccgccaccaacggcagggccgtccctgaggatctcaggcttaagctcgacgacgaggagccagggaacaaggacgttggtgggagtacggcgcatgcggcgtcctcgggctccatcgtcgacgtgttccggtcgccgaccacgcgggtgcggcttgtgctctccgtgcttatcaacctcctcagctcggtggtgtactacggcctcagcctcaacgtggtcaacctcaagaccaacctctacgtcaccgtcgtcgtcaactcgctcgccgagatgcccgcctacctgctcacggcgctcctcctcgatcatttcgggcggaagcctctcgccatcggcaccatgctgctcagcggcgtcttctgcaccgccgggagtctcgtacccggcgcagggatcatgagggtggcgtgcggcgtggtgggcatcttcggcatggcggcaacgtacaacctgctgttcatctacacggcggagctgttccctacggtggtgcggaacgcggcgctggggtgcacggcgcaggcggcgcagatgggggccatcgtggcgccgctggtggtgatgctcggggagaggctgccgttcgcggtgttcggcgcctcgggcatcgtcggcggcctgcttgtcttgtacctgccggagacgatgaacaagcccctgtacgacaccatggcgggtctggaggaaggggagaagaacgttgtcaagtgacacatgttgggatctcagatcagatgaaacggtcttttgtagtctcgtgttcactacgatcgaatgtgcaatagtgcaagatgtcgcgaggtgatgaattccacaaagacgaggagagttagtgctggcttactgccaaggagtggggatctagcggtgctgtttttcaggttacgctagtgtacatctaagcgtccagcttgtgcccgactacacatctccaagtttaacgaagaattgtttttcctcgt

SEQ ID NO: 3990 - DNA, 1777 bp, Sorghum bicolor
atgtcgacgacggagccgctcctctcggcctgcgccggcggcggcgcgggtggcaatgacggcgaggaggcggggaagaagagtcgtcagagcagcagcaagggtcggcgcgtgtgcatcgacgaggcgctgtcgtcgtacgcgggggagttcgggcggtggcagctgcggcacttcgtggcggtgtcggcggcgtgggcgctggaggcgctgcacaccatggtgatcatcttcgcggaccgggagccgcccacgtcctgcgccggcggcgggtgggagtgggccggcggcggcgccgcggcgtcgtcgtcgaccgtcgccgagtgggggctcgtctgcggcgagcggtacaaggtcggcctcgcccaggccgtcttcttcgccggctgcatgatcggcgcgggcgtgttcggccacctgtcggactcgttcctgggccggaaggggtcgctacaggtggtatgcatcctcaacgccgctttcggcctgctcacggcggcgtccccaaactactgggcctacgcggcgctgcggctcctcacgggcttcagcacgggcagcgtcggcgtgctggccttcgtcctagccaccgagcccgtcggccccgcccgccgcggcgccgcggggatgtccaccttctacttcttctccggcggcatcgcggcgctcgcgggcgtcgccgcgctcttcccgcgctcctggcgcttgctctacgtcgtcacctccattccctcgctcgtgttcgccgtcgccgtcgtgccgttcgtctccgagtcgccgaggtggtacctcgtccgccgacgacccgacgacgcactaagggtcatccgcgccatcgcggctactaatggcagggccgtacctgaggatctcacgctcaagctcgacgacgaggacgaggatgatgaggaggagcaggggaaggaaggtggtgcgggcatggccaaggcggcggcggccgccgcgtcctcgggatccatcgtcgacgtgttccggtcgcggaccacgcgggtgcgcctcgtcctctccgtgctcatcaacctcctcacctccgtggtgtactacggcctcagcctcaacgtcgtcaacctcaagaccaacctctacgtcaccgtcgtcgtcaactcgctcgccgagatgcccgcctacctgctcacggcgctgctcctggaccgtttcggccggaagcctctcgccatcggcaccatgctgctcagcggcatcttctgcaccgccgggagtctcatacccggcgcagggatcatgagggtggcgcggatggcgtgcggcgtggtgggcatcttcggcatggcggcgacgtacaacctgctgttcatctacacggcggagctgttcccgacggtggtgcggaacgcggcgctggggtgcacggcgcaggccacgcagatgggggccatcgtggcgccgctggtggtgatgctcggagagaggctgccattcgcggtgtttggcgcctcgggcatcgtcggcggcctgctcgtcttctacctgccggagaccatgaacaagcccctgtacgacaccatggcagggctggaggaaggggagaagagcgttctcaagtgatcgagacgatggggcgaggtctgtcaagtcggtggcaaaggttgggggctcagataaacggtcttcggtgtagtctcatgtttactgggagtgtttgcacagagctgcatcgtcggaatctgcatctccgctgtccagtctactgaatactggtcctatgaatactgtccagtatcgtttaagacaggta

SEQ ID NO: 3991 - DNA, 1882 bp, Hordeum vulgare subsp. vulgare
gagtacacgcgtgcgcgcacacaccccgcgccaagggaacgacgcgggtccgcgacgtacgtgcgtgcgacagccggccggccatgtccacggaggcgctgctggccgcttccggcggcggcggcggagggggagcggcgagccggcgcctgagcatcgacgacgcgctggcggagcacgcgggggagttggggcggtggcagctgcggcacttcgtgctggtgtcggcggcgtgggcgctggaggcgctgcacaccatggtcatcatcttcgcggaccgggagccggccatgcggtgccccgcgggggacgggcggtgcggcgaccggtgcgccggcgcggcggccgggtgggagtgggcgcaggggagcgcgtcgtcgacggtggccgagtggggcctggtctgcggcgagcggtacaaggtcgggctcgtccaggccatcttcttcgccggctgcatgatcggcgccggcgtgttcgggcacctgtcagactcgttcctggggcggaagggctccctccaggtggtctgcttcctcaacgcgctcttcggcctgctcaccgcgctctcccccagctacagggtctacgtcgtcctccgcctcctcacgggcttcagcaccggcagcatcggcctgtgcgccttcgtcctcgccacggagcccatcgggccctcccgccgtggcaccgccggcatgtccagcttctacttcttctccggcggcatcgcggccctcgccggcgtcgccgcgatgttccagtcctcctggcgcctcctctacgtcgtcacctccctcccctccctcgtcttcgtgctcgccgtcatgccgttcgtgtccgagtcgccgcggtggtacctcgtgcgacggcgcaccgacgatgccatgcgcgtcttgcgcgacattgcggctaccaacggccggcgcatcccggacggcgtcacgctaaagcttgatgatgagggagatgatgtcaccggcggcaagcagatcgaggagtcgccgccggcgccgtcgtcgtcgggatcgatattggacgtgttccgatcgaggacgacgcgggccaggctagtgctgtccgtgctcatcaaccttctctgctcggtggtgtactacgggctcagcctcaacgtcgtcaacctcaagaccaacctttacgtcagcgtcgccgtgaactcgatcgccgagatgccggcctacctgctcaccgcactgctcctcgaccactttggccgcaagccactcggcatcggcaccatgcttctcagcggcgtcttctgcatcgccggcagcctcatcgccggcgtcggcgccatgagggtggtgaggatggtatgcggtgtggtgggcatctttgggatggcggcgacgtacaacttgttgttcatatacacggcggagctgttccccacggtggtgcggaatgcggcactagggtgcacgtcgcaggcatcgcagatgggtgccatactggcgccaatggtggtcgtgctcggggaacgggtgccgtttgcagtgttcggcgtgtcggggatcatcggcgggctgttggtgttctacctcccggagacgatgaacaaacccttgtatgacaccatggccggcctggaggaaggagagaagacccccttgaagtaagagtaggtaaggtgcaggggtaactctgaattatatcagttttcgcgtgtatctttgtactgaaagacgttgccggtagaaaatgtttttttttgaaagggtagaaaatgcttgtcgatggagtgaatcgcaagtcgcttcgtttattttcttgttctaaggggtttgtaggtttttcttttggaacatactgtattactgtagattatttcacatgttggtaaatcaaaggaatgtttttctcc

SEQ ID NO: 3992 - DNA, 3160 bp, Oryza sativa Indica Group
cgacggaggcgctcctcgccggcggaggcggcggtggcggtggaggcgaggtgaagcggcgcgtgagcatcgacgacgcgctggcgtggcacgcgggggagttcgggcggtggcagctgcggcacttcgtgctggtgtcgtcggcgtggctgctggaggcgctgcacaccatggtcatcatcttcgccgaccgggagccggccatggtgtgcgccgccggggacggccggtgcggcgaccgctgcgccggcgccggcgccgccgcggggaccgggtgggagtgggccagcgggcgcgcctcgtcgacggtgtccgagtggggcctcgtctgcggcgagcggtacaaggtcggcctcgtccaggccatcttcttcgccggatgcatgattggtcagtgctccaattctcgtccaaattaccttcgtttccaagtagtttttttttttgacgaattacgcaacggaatgccaaaatgcaaaatactaagattggatgaaacgcttgccttaattgtggcatcgacgtgagaggcaatacgtaatatacgagactaatccgtgaaacaaaaataggctagcatttcaaactagattggacgatggattgcagaccgcgacgttccgggagatttcgtggtggtgcatttttgcagcccggaatcgtacgtgtggctccagctagtttggttgcatacggccgcatcttggagctagctagccagccagccagccagccaacatcccagcgtgtgctactgtagttcattgtcccatccgtttaatttttctactagtaacagataaagggtccgatttactactgaacagttgcatatttgcatcacactcgttaacaatttagattggttgtcattacacatgagattagttttgacaggtcaactttatgccatcagccactcagcattagcatcgtcgacataatggatgtaaattactgagcattatctgcacaagcggcgccgtgccaatgcctcccttatctttccgcggctgctggcggctgggagattaattaattaggttccggacagttcggtgttcagcttttgcttgactcctgtaccgtcttaacatctttcgctaactttaattccaagagctgtcgatcgatcgaacccaatatgctgcctggaccctgttagccgtgggttcctgcatgcgtggctgcgctcactgtcgttatttgctttagcccaacctgtcactgttgttaacctactgtcaatataattgatcaggtcactgaattgattacgttatctcacggtgctcgatgaaaagctagccgtctagttcggctgatctgatctaaatcacgtggcaataggccggatgcagattgtgtctcgcagaaatttccttccttgtttctcagcgcatgtttaaatagctgttattttcaagctttttgtttggattggccagaacaagatatactttcgaatcttttgactggtactagcatctccctgcctgacaccggtatctttggaattttggatggggactgggaagccaagatgtgagatcaataaatcatttgaatctcattatatcggttactacataatcaccaaaatcaagcttgtcgaatcctggtagtgatcaatagctcctaaccttttttttttagaactactaatagctacttcaccatgtctgtttcggcggtggcattaaccagtcaagatcgccggcgctggtggcccatttgggcctaattttcatcatcaacgtaggctagttattaggctgggccttggcccagtatctgacacagtcgatgggccagttttcctttcctttttgatttggtgacagaagtaattgtagctgagttccacaaagaaaaagaaaaaaaaagaagtagaaataattttagctgtgttgtcttggcaggcgccggcgtgttcggacacctatcggattcgttcctcggtcggaagggctcgctgcaggtggtctgcgtcctcaatggcgtcttcggcatgctcaccgcgatggcgcccaactactgggcgtacgccgcgctgcgcctcctcaccggcttcagcgccggcagcgtcggcctctgctccttcgtcctcgccaccgagcccgtcggcccctcccgacgcggcgccgcggggatgtccaccttctacttcttctccggcgggatcgccgccctcgccggcatcgcggcgctgttcccgacgtcctggaggatgctctacgcggtcacgtccctgccgtcgctcgtgttcgtcgtcgccgtgctgccgttcgtctcggagtccccgcggtggtacctcgtgcgccgccgcgccgacgacgcgatgcgcgtcgtgcgcgccatcgcgtccagcaatggcaggagcattcctgacgacgtgtccctcaagctcgacgacgagggagacgacgacaacggcgccggcgctggcaaggtcgtcgactcgtcagcgtcggcgtcgggctccatcatcgacgtgttccggtcgcggacgacgaggttcaggctggtgctctcggtggtgatcaacctgctcgcctcggtggtgtactacggcctcagcctcaacgtcgtcaacctcaagaccaacctctacgtcagcgtcctggtgaactcgctcgccgagatgcccgcctacctcctcaccgcgctgctcctcgaccgcttcggccggaagccgctcgccatcggcaccatgcttctcagcggcatctcctgctccgccggcagcctcatcgccggcgccggcgccatgaggtatacgtaatctccaatcatccaatcaaattcagctacgcgaacaaatttctgatcgatagagggcagggtggcgaggctggcgtgcggggtggtggggatcttcggcatggcggcgacgtacaacctgctgttcatctacacggcggagctgttcccgacggcggtgcggaacgcggcgctggggtgcacgtcgcaggcgtcgcagatgggcgccatcctggcgccgctggtggtggtgctcggggagcgcgtgccgttcgcgctgttaggcgtgtcgggcctcgtcggcgggttcctcgtgttctgcctgccggagacgaagaacaagcccatgtacgacaccatggccggcctggaggaaggggagaagaccctcctaaaa

SEQ ID NO: 3993 - DNA, 3164 bp, Oryza sativa Japonica Group
tcgacggaggcgctcctcgccggcggaggcggcggtggcggtggaggcgaggtgaagcggcgcgtgagcatcgacgacgcgctggcgtggcacgcgggggagttcgggcggtggcagctgcggcacttcgtgctggtgtcgtcggcgtggctgctggaggcgctgcacaccatggtcatcatcttcgccgaccgggagccggccatggtgtgcgccgccggggacggccggtgcggcgaccgctgcgccggcgccggcgccgccgcggggaccgggtgggagtgggccagcgggcgcgcctcgtcgacggtgtccgagtggggcctcgtctgcggcgagcggtacaaggtcggcctcgtccaggccatcttcttcgccggatgcatgattggtcagtgctccaattctcgtccaaattaccttcgtttccaagtagtttttttttttgacgaattacgcaacggaatgccaaaatgcaaaatactaagattggatgaaacgcttgccttaattgtggcatcgacgtgagaggcaatacgtaatatacgagactaatccgtgaaacaaaaataggctagcatttcaaactagattggacgatggattgcagaccgcgacgttccgggagatttcgtggtggtgcatttttgcagcccggaatcgtacgtgtggctccagctagtttggttgcatacggccgcatcttggagctagctagccagccagccagccagccaacatcccagcgtgtgctactgtagttcattgtcccatccgtttaatttttctactagtaacagataaagggtccgatttactactgaacaattgcatatttgcatcacactcgttaacaatttagattggttgtcattacacatgagattagatttgacaggtcaactttatgccatcagccactcagcattagcatcgtcgacataatggatgtaaattactgagcattatctgcacaagcggcgccgtgccaatgcctcccttatctttccgcggctgctggcggctgggagattaattaattaggttccggacagttcggtgttcagcttttgcttgactcctgtaccgtcttaacatcatctttcgctaactttaattccaaaagctgtcgatcgatcgaacccaatatgctgcctggaccctgttagccgtgggttcctgcatgcgtggctgcgctcactgtcgttatttgctttagcccaacctgtcactgttgttaacctactgtcaatataattgatcaggtcactgaattgattacgttatctcacggtgctcgatgaaaagctagccgtctagttcggctgatctgatctaaatcacgtggcaataggccggatgcagattgtgtctcgcagaaatttccttccttgtttctcagcgcatgtttaaatagctgttattttcaagctttttgtttggattggccagaacaagatatactttcgaatcttttgactggtactagcatctccctgcctgacaccggtatctttggaattttggatggggactggaagccaagatgtgagatcaataaatcatttgaatcgcattatatcggttactacataatcaccaaaatcaagcttgtcgaatcctggtagtgatcaatagctcctaaccttttttttttagaactactaatagctacttcaccatgtctgtttcggcggtggcattaaccagtcaagatcgccggcgctggtggcccatttgggcctaattttcatcatcaacgtaggctagttattaggctgggccttggcccagtagctgacacagtcgatgggccagttttcctttcctttttgatttggtgacagaagtaattgtagctgagttccacaaagaaaaagaaaaaaaaaagaagtagaaataattttagctgtgttgtcttggcaggcgccggcgtgttcggacacctatcggattcgttcctcggtcggaagggctcgctgcaggtggtctgcgtcctcaatggcgtcttcggcatgctcaccgcgatggcgcccaactactgggcgtacgccgcgctgcgcctcctcaccggcttcagcgccggcagcgtcggcctctgctccttcgtcctcgccaccgagcccgtcggcccctcccgacgcggcgccgcggggatgtccaccttctacttcttctccggcgggatcgccgccctcgccggcatcgcggcgctgttcccgacgtcctggaggatgctctacgtggtcacgtccctgccgtcgctcgtgttcgtcgtcgccgtgctgccgttcgtctcggagtccccgcggtggtacctcgtgcgccgccgcgccgacgacgcgatgcgcgtcgtgcgcgccatcgcgtccagcaatggcaggagcattcctgacgacgtgtccctcaagctcgacgacgagggagacgacgacaacggcgccggcgcaggcaaggtcgtcgactcgtcagcgtcggcgtcgggctccatcatcgacgtgttccggtcgcggacgacgaggttcaggctggtgctctcggtggtgatcaacctgctcgcctcggtggtgtactacggcctcagcctcaacgtcgtcaacctcaagaccaacctctacgtcagcgtcctggtgaactcgctcgccgagatgcccgcctacctcctcaccgcgctgctcctcgaccgcttcggccggaagccgctcgccatcggcaccatgcttctcagcggcatctcctgctccgccggcagcctcatcgccggcgccggcgccatgaggtatacgtaatctccaatcatccaatcaaattcagctacgcgaacaaatttctgatcgatagagggcagggtggcgaggctggcgtgcggggtggtggggatcttcggcatggcggcgacgtacaacctgctgttcatctacacggcggagctgttcccgacggcggtgcggaacgcggcgctggggtgcacgtcgcaggcgtcgcagatgggcgccatcctggcgccgctggtggtggtgctcggggagcgcgtgccgttcgcgctgttcggcgtgtcgggcctcgtcggcgggttcctcgtgttctgcctgccggagacgaagaacaagcccatgtacgacaccatggccggcctggaggaaggggagaagaccctcctaaaa

SEQ ID NO: 3994 - DNA, 1555 bp, Zea mays; identical to SEQ ID NO: 1123

SEQ ID NO: 3995 - DNA, 1240 bp, Sorghum bicolor
aaaaagagaagggagaggggaaaagcttgttgctggttggcttgctacagaagccgcgtgcggagcaaggagggagaggggagagggagagagagagagagagagagagagagagagagagcaagcgggctagcggtggcagccatggcagagcagcacagggaggagtcgggcgggtcagtgctggacaagatctcggacaagctccacggccgcgggagcggctcgtcgtcgtcgtcgtcggactcggacgacgagcactcgtcggcgacggccgccgtgaaggccaagatctaccgcctcttcggccgggagaagcccgtccactccgtcctcggcggcggcaagccggcggatctgtttctatggaggaacaagagaatctctggtggggtgctcgcaggcgcaactgccatctggctgctgtttgaggtcatggattaccacctcctcaccctgctatgccactgcctcatcctcaccctggccatcctgttcctctggtccaatgccacgactttcatcaacaagtctcctcctaacatccctgaggtgaagatcccagaggacctggctgtgaatgttgcacgttccctgagatatgagatcaacaggggatttgctaccttgagggagatcggccaaggccatgacctgaagaaatttctgattgtgattgcaggactatggatcctttctgttcttgggagctgctgcaatttcctcaccttgtcctacatagtttttatggtattgtacactgtgccggtcctgtatgagaagcatgaggataaggttgatgcttttggtgagaaggccatggtcgagctgaagaagtactatgccatcttcgacgagaaatgcctatcaaagattccgaagggcccattaaaagacaagaagcaacattagaagagcacaatcagacaagggtctgcggtgatttatcatgtcttttgatcattacttgtcggttttgaaggatgaatgtgattccatgtctccatgtgatggtaaatacctggacgtgttctagtgtattagtgtggtcagtagcaatgtgctaaattatctaaggttacgcagaattgtgttatgaattcccagtttaacattaccctccttggaagtggtggttccctcggtgtttgtaatatatatctagtgctatttcataaccggacctagggctacgatgaattgttctcgctggttattgatatatttgatgcttccgttg

SEQ ID NO: 3996 - DNA, 1192 bp, Zea mays
caaccgcgtccgcgtgtggagcaaggaaggcgaggggagccgagcgggcaaccggcggcgacagacatggcggagcagcacaaggaggagtcgggcgtgacagtgctggacaagatctccgacaagctccacgggcgcgggggcggctcgtcttcgtcgtcggactcggacgacgagcgctcgtcggcgacggccgccgtgaaggccaagatctaccgcatcttcgggcgcgagaagcccgtgcactccgtcctcggcggcggcaagccggccgatctgtttctatggaggaacaagaggatctctggtggggtgctcgcaggcgcaactgccttctggctgctgtttgaggtcatggattaccacctcctcaccctgctatgccactgcctcatcctcaccctggccatcctgttcctctggtccaatgccacgactttcatcaacaagtctcctcctaacatccccgaggtgaagatcccagatgacctggctgtgaatgttgcacgttccctgagatatgagatcaacaggggttttgctaccttgagggagattggccaaggccatgacctcaagaaatttctgattgtgattgcaggactgtggatcctttctgttcttgggagctgctgcaatttcctcaccttgtcttacatagtttttatggtactgtacactgtaccggtcctgtatgagaaacatgaggataaggttgatgcttttggtgagaaggccatggtcgagctgaagaggtactacgccatcttcgacgagaaatgcctatcaaagattccgaagggcccattaaaagacaagaagcaacattagaagcttagaatcagataagggtctgcggtgatttatcatctcttttgaccattattcgtcggttttggtggatggatgtgattccatgtctaaatacctggacgtgctctagtgttttagtgtggtcagtagcaatgttctaaattatctgagattacgctgaatcatgttctgaagtccacgtttaacgttgctctccctatcctttggaagtggcaatttcctcaatgtctgtaatatatctagtctagtgctatttcttaatctgacctagcgtcatgatgaacccttcttggatatttatttatttgtgccactggacatggtaattagagagcacgtaaattgtacatttgccatc

SEQ ID NO: 3997 - DNA, 1111 bp, Oryza sativa Japonica Group
aaaaaaaaaagaaagaagagttcgactgttcgagcgaggagggagaagaagagggggagagagagagccagcagctagccatggcggagcacaaggaggaggagtcgttggtggagtcggtgatggacaagatctccgacaagctccacggccgcgggggctcgtcgtcgtcgtcgtcggactccgacggggagaggacggccgacttgaaggccaagatctaccgcctcttcggccgcgagaagcccgtccactccgtcctcggcggcggcaagcctgctgatctctttctatggaggaacaagaaaatctccgttggggtactcgctggcgccacggccatctggctgctgtttgaagtcatggattatcatctcctcaccctgttgtgccactgtatcatcctcaccctggccatgctcttcctctggtccaatgcctcaactttcatcaacaagtcccctcctaacattcctgaagtgaagatcccagaggacctggctgttaatgttgctcgctcactgagatttgagatcaataggggctttgctaccttgagggagattggtcaagggcatgacctgaagaaatttctgattgttgtcgtgggtctctgggttctctctgttcttgggagctgctgcaatttcctgaccttgttctacatagtctttatggtactgtacaccgtgcctgttctgtatgagaagtatgaggaccaaatcgatgcttttggagagaaggccatgatcgaactgaagaagtactatgctattttcgatgagaaatgcctctctaagatccccaagggtccgttgaaaaacaagaagcattagaaattgtaggatgagccgtagaaggtactatgctaatttatcatccagcctgatcactaattgtcggttttaaaggatggctacgattccatgcctttactgatagtaaatacctacattttggtgtggctagtagttgcgatgtgctgaacttcaatgaattcgaattatgccagcatgctctatctatatcctgttttcaaactcatgtttaactcaacttccgcccctggaagctgttggtactaagtgctatcaatatgtgacttatcttt

SEQ ID NO: 3998 - DNA, 1149 bp, Zea mays
acacggcgtctttgggtgagcacaccgcgcagcaacgagaggggcaaacaagcttgctactgtgatttctcgtccgagcagcggcggaggagagagagagagcatggccgaccacaaggaggagcctgtgccggagtctgtgatggacaagatcaccgagaagttccacggcggggactcgtcgtcgtcgtcgtctgactcggacgacgagaagaaggggtcctcgttggcgtcggcggcggaagccatgaaggccaagatctaccgccttttcggccgggagaggcccgtccactccgtcctcggcggcggcaagcctgccgatcttatcctatggaggaacaggaagatctctggcggggtacttgctggtgccacggccatctggctcctattcgaggtcatggagtaccatctcctcaccttggtgtgccactgtctcatcctctcgctggccatcctcttcctgtggtccaatgcctccactttcatcaacaagtccccaccgaacattcctgaggtcaaaatccctgaggatgtggctgttaatgttgccctgtcactgagatatgagatcaacaggggctttgctaccttaagggagattgggcatggccgtgatctgaagaaattcctaattgttattgcaggtctctggcttctttcagttctcgggagctgctgcaacttcctgacactgttctatattgtctttgtggcactgtacactgtaccagttctgtatgagaaatatgaggacaaggttgatgcttttggtgagaaggctatgactgaactgaagaagtattatgccattttcgatgagaagtgcctatcgaagattccaaagggcccccttaaggataagaagcactagattggtagtaaggtatttgctatgaatcaacatctacattatgtcactagctgtcacctctttctctgaaggatggtgcttggtcctggtctctagttgatagtatataatctgtatgggcaactttggtgtgactgacagtctgctgaaaactgttgatcttgtttttgggtttcagctttcaccatagttgcctggaagcttgaaatatattatgcgctctatcaatgtcatgtgaactttgtcatgtacctycaaaaaaaaaaaaaaaa

SEQ ID NO: 3999 - DNA, 1161 bp, Hordeum vulgare subsp. vulgare
gaaagggattgattgatccagcgggcgacggcaggcagagtcgcagagaaggcaagcgtccgtcgggctcgagcgagcgagcgagagagagagggcagcatgagcgagcagggggcggggcagggcagcaaggaggagtcgctgatggacaagatcacggagaagttccacgggtcgtcctcctcctcctcgtcgtcggacgacgaggcggggagggccgccgggtcgtcgtcgtcgtccgtcaaggccaagatctaccgcctcttcggccgcgagaagcccgtccactccgtcctcggcggcggcaagcccgccgacctcttgctgtggaggaacaagaagatctctggcggggtgctcgcgggcgccaccgccatctggctgctgtttgaggtcctggagtaccatctcctcaccctcctctgccacggcttcatcctcaccctgggcatcctcttcctctggtccaacgcctctgccttcgtcaacaagtgccctcccaacattccagaggtgaagatccctgaggacctggcggtcaatgttgcccgctcgctgcgctatgagatcaacaggggctttgctagcctgagggccattggccaaggccgcgacctgaagaaattcctgattgtggttgcaggcctgtggatcctctctgctcttggcagctcctgcaatttcctcaccttgttctacatagtcttcatggtactctacaccgtgcctgtcctgtacgagaagtatgaggacaagattgatgcttttggagagaaggccatggtcgaactgaagaagtactacgccatcttcgatgagaagtgcctgtccaagattcccaagggtccgtccaaggacaagaagcagcattagaacagtagagattaccctgcgcagatttatcttcaaagttgatcactactcgtcggttttcaaggatggttgtgaacttgtgattccatgtccgtaggtgatagtagataccactatctggtcaaaatcctggcacggtcattagtgtgacgtgcaacttctacgaacttagtaatcatgccagcttttgctcaatatcctcacttgcaagttgtgttggtgtaatatggcagtgatgtttgtgacttcaggagacttggtacaatgaagtggctctttgggtgtgtc

SEQ ID NO: 4000 - DNA, 1067 bp, Zea mays
caaccaccaggcacagccaacaagcttgctagtgtgtggtttctctcatcaggtcaggaggagcatggccgaccataaggaggagcagtctgtgatggacaagatctccgagaagttccacggcggggactcctcgtcgtcgtctgactcggacgacgagaagaagaaggggtcttcttcggcgtcggcgacggaggccatgaaagccaagatctaccgtctcttcggccgcgagaggcccgtccactctgtcctcggcggcggcaagcccgccgatcttgtcctatggaggaacaagaagatctcaggcggggtactcgctggtgccacggccatctggctcctgttcgaggttatggagtaccatctcctcaccttggtgtgccactgtctcatcgtctcgctggccatcctgttcctgtggtccaacgcctccagtttcatcaacaagtccccaccaaacattcctgaggtgaaaatccctgaggatgtgtctgttaatgttgcactgacactgagatacgagatcaacaggggctttgctaccttgagggagattggacatggacacgatctaaagaaattcctaattgttatcgcaggtctctggctcttttcagttcttgggagctgttgcaacttcctgacactgttctatattgtctttgtggcactgtacactatacctgttctgtatgagaaatatgaggacaaggttgatgcttttggtgagaaggctatgatcgaactgaagaagtattatgccatcttcgatgagaagtgcctatcgaagattccaaagggcctcaaggataagaagcactagattggtagtaaggtacttgatatgaatcaacacccacgttaagtcacaccttccttgaaggatggtgcttggtcctggtctctagttgatagtatataatctgtatgggcaactctggtgtgactgacactttgatctgctgaaaattgttgatcttgtttttggtttcaactttcagcatacttgcctggaagcttgaaacatatcacgcgctctatcaatgtcatgtgaactttgccat

SEQ ID NO: 4001 - DNA, 1324 bp, Oryza sativa Japonica Group
cgatactttcgtcggagcaaactctctctgtttgaagccacggagaaaaagcttgggtgatttcttggaagcgaagagtgaggggagaagaagaagaagaagaagaagaagaggggggaggaggaggagcagcatggctgagcacaaggaggagcagtcggtgatggagaagctctccgagaagctgcacggcgactcctcgtcgtcttcctcggactcggacgacgacaagaagggttcctcctcgtcgtcggcggcggcggccatgaaggccaagatctaccgcctcttcggccgcgagaggcccgtccactccgtcctcggcggcggcaagcctgctgatctcgtgctatggaggaacaagaagatctccggtggggtgctcgccggagccacggccatctggctactcttcgagatcatggagtaccacctcctcaccttggtgtgccactgcctcattctctccctggctgtcctcttcctctggtccaatgcctccactttcatccacaagtcccctccaaacattcctgaggtgaaaattccagaggacttgacagtaaacattgccctttctctgagatatgagatcaatagaggttttgcaaccttgagggagattggtcatggccgtgatctgaagaagttcctcattgtgatcgctggactctggattctgtcagttcttggtagcagctgtaactttttgactttgttctacatagtttttgtggcgctctacactgtgccagtactgtatgagaagtatgaggacaaggttgatgcttttggtgagaaggctgagattgaatttaagaagtactatgccctctttgaagagaaatgcctatcgaagattcccaagggtcctttgaaagataagaagcactagattagtagaaggtacctgcaatgaatcagcagccgtgttaatcactattgctcgacttttattttggaggatggttatgagtccttgtgtgtgtgtctagttgataatatatacttgcatgggcagttctagccttctagcatggctgatagttgttatgtggtggcagatggttgtggcgtgcaatcttttgtggagttgagcaatgctggctcaaatctgctgatcttttcccccctttcatgttcaactttaagcatagttactatatctggatgctagaagtattatggtactatcaatgccccaagtgaaccttgtgatatattgtttcatggctttatgttttttaccggttttaggctagtgggatgtattatggtattactttgtttgctgatatgaaatctggtaatctggtccgtcttc

SEQ ID NO: 4002 - DNA, 1101 bp, Zea mays
aaaggctacaagcctacaagcaaccgcgtccgcgtgtggagcaaggaaggagaggggagccgagcgggcaaaggggagcgcggcgacagacatggcggagcagcacaaggaggagtcgggcgtgacagtgctggacaagatctccgacaagctccacgggcgcgggggcggctcgtcttcgtcgtcggactcggacgacgagcgctcgtcggcgacggccgccgtgaaggccaagatctaccgcatcttcgggcgcgagaagcccgtgcactccgtcctcggcggcggcaagccggccgatctgtttctatggaggaacaagaggatctctggtggggtgctcgcaggcgcaactgccttctggctgctgtttgaggtcatggattaccacctcctcaccctgctatgccactgcctcatcctcaccctggccatcctgttcctctggtccaatgccacgactttcatcaacaagtctcctcctaacatccccgaggtgaagatcccagatgacctggctgtgaattttgcacgttccctgagatatgagatcaacaggggttttgctaccttgagggagattggccaaggccatgacctcaagaaatttctgattgtgattgcaggactgtggatcctttctgttcttgggagctgctgcaatttcctcaccttgtcttacatagtttttatggtactgtacactgtaccggtcctgtatgagaaacatgaggataaggttgatgcttttggtgagaaggccatggtcgagctgaagaagtactacgccatcttcgacgagaaatgtctatcaaagattccgaagggcccattaaaagacaagaagcaacattagaagcgtagaatcagataagggtctgcggtgatttatcatctcttttgaccattactcgtcggttttggaggatggatgtgattccatgtctaaatacctggacgtgctctagtgttttagtgtggtcagtatcaatgttctaaattatctgagattacgctgaatcatgttctgaagtccacgtttaactttgctctccctatcctttggaagtggcaatttcctataaaaaaaaaaaaaaaaaa

SEQ ID NO: 4003 - DNA, 1104 bp, Sorghum bicolor
atgcccggcggccgaaagcgtccggccccgttcgccggcttctccccctttgctcgctccctcatcttctccgccagcacctcaagctgtccaaaagcgctcccccttcccgacgcttccacctccgacgccgacgctgaaacccctcgccaagacaacatgccgcggccgccgtccaagcgcgcgaagctgaccgagccctccagcgacgaggtggaggaccgcggcagcagcggaagcgaagaggaaagcttcagcaccagcggcagcgacgacggcgaggattcgtcggaggagcttgagacggtgcaagcggacttcgccttcttcgaccccaagccgagcgactttcatggcgtcaggctgctgctcaagacgtacctcgactccaagccctgggacctcaccggcttcgttgaccttatcctggcacagacgacagtaggcacggtcgtcaagttggctgatgacgacgacgaggaaggggaaggaaacggtgctgagaaggccaattccagtaacaacactgacgatgatgatctgtttggtctcattagtgtgctcaatttgggacgacacgctgagcaaaaatgcattaaggaccttaaggagtatctgcttgctgtctgtgccgacaagggtactaagaagcagctcaggtctctgctcgaagataaagcatcaagtgtgggccttctggtgtgtcgccgctttgtgaatttcccttatgaactcgtgcctaagctgtatgacgcactcttcgacgaggtttcctgggcaacagaagatgagccaacaaaagaacttcgggactccttccggttcaagcagtacctgttggttgtcagaatgctcgagaggaaaacccctgcaaaacataaatcaaagaagagcaaagatgatgatgaacctgttatctatccaaagttagaagatgaaatttttcacaagcttagctcatggtctttcacttttccaatacgttctgagcagtcagctcaacaggagatgaaagattacaaagagatgggcttagtgatggcaattaaagctgacgtagttccaaagttccgaaagaagttggaagatttggtgtccgagtag

SEQ ID NO: 4004 - DNA, 1300 bp, Zea mays
cccgtcctctttccgccgccgcccagacaccacagagcaatgcccggcggccgaaagcgtccggccccgttcgccggtttctccccattcgctcgctccctcatcttctccgccgccacgtcaagctgtccaaaatcgcgtcctctccccgacgcttccaccgccgccgaaacccctcgccaagacgacatgccgcggccgccgtccaagcgcgcgaagcgagccgagccctccagcgacgaggtggaggaccgcggcagcagcggaagcgaagaggagagcttcagcaccagcggcagcgacagcgacagcgatgacggggaggagtcctcggaggagctcgagacggtgcaagcggacttcgccttctttgaccccaagccgagcgacttccatggcgccaggctgctgctcaagacgtacctcgactctaagccctgggacctcaccggcttcgctgatctcatcctcgcgcagaccactgtaggcacggttgtcaagttggccgatgacgaggaggaggaaggggaagggaacggtgttcagaaggccaattctagtactaacaatgacgacgatgatctgtttggtctcattagcgtgctcaatttgggacaacacgccgagcaaaaatgcatcagggatcttaaggagtatctgcttgatgtctgtcccgacaaaggtactaagaagcagctcaggtctctgcttgaagagaaagcgtcgagcgtgggcctgctggtgtgtcgccgctttgtgaatttcccttatgaactcgttcctaagctgtatgacgcgctctttgacgaggtttcctgggcaacagaagatgagccaacacaagaactccgggactccttccggttcaagcactacctgttgatcgtcagaatgcttgagaggaaaacccctccaaaacataaatcaaaggcgaacaaagatgatgacgaacctattatctatccaaagtttgaggatgaaatttttcacgagcttagctcatggtctttcacttttccaatacgttctgaagagtcagctcagcaggagatgaagaattacaaggagatgggcttagtgatggcaattaaagcaggcacagttctgaagttcagaaagaagctgggggatttggtgtccgaataggagcgtaattgaccgatgtggattttgctgctgtccacgtggtttgaacatttccacattcagcctgttgtctgtaacgatgtgattctgattggagcttgaatggtggcaatggtattgacattgtcgttgatttgcaaaaaaaaaaaaaaaa

SEQ ID NO: 4005 - DNA, 1376 bp, Oryza sativa Japonica Group
ctctccgaaccagccgccgccgccgccgccgccgactgctcggcgatcatggtcggcgaccgaaagcgcccggctcccttcgccggattctccccgttcgctcgctccctcctcttctccgcctcctcctctaaaccactacctccccccgaggatccacccgccgccgccgccgacgaaatcccttcaggaatcgccggctccagtcgcgatatgccgccgcccaagcgcgccaagcgggccgagccttccagcgacgaggagcgctacagcagtgacgacgagagctacagcagcgactccgacgacagcgacgacgcgtcggaggagctcgatacggtgcaagcggacttcgccttctacgaccccaagcccggcgacttccatggcgtcaagctgctgctcaagacctacctcgactccaagccgtgggatctcactggcttcgtcgacctcatccttgagcagaccacggtgggtacggttgtcaagattgctgacgatgaagaggatggtgaaggaaatggtgctgatggaagcagcactggtggcaatgacgatctgtttggtctcattagcgtgcttaatcttggaagatacagtgagcaccgctgtatgaaggatcttaaggattacctgcttgctgtttgtggtgacaaggataccaagaagaagctcaagcaaatgctgggggacaaagcacctgatgtgggtctgcttgtgtgccgccgttttgtgaatttcccatatgaacttgtgcccaagatgtatgaatcgttatttgacgaagtttcatgggccacagaagacgagccaacacaagaactccgggactccttccggttcaagcagtacctaatggttgtcagagtacttgagaggaaaactccagcaaagcaaaaggcaaagaacagtacagaagaggatgagcctattatctatcctaagttagaagacgaaatttttcgcgagctttcttcatggtcgttcactttcccaatacgttctgaacaatcggctcagcaagagatgaagaattacaaggagatgggcttagtgatggccgtcaaagctgaagcaattccgaagttccgaaagaagttggaggatctactatctgaatagttctctccacgcattgtaggtcgtgtggaattttgctgctgtccacatgatattggaacctccatatcttctcttgctattgcttgttagtgtccctagtaagcgcggacgctaagtttgtgagtgcaaagccctaattgaattgctagcattgccatagtagaagagaaattcatgtgtaagaggaaatcaattatgaacttcccttatactgatatcaagagattttgaaggacttttttggttgctcg

SEQ ID NO: 4006 - DNA, 1535 bp, Hordeum vulgare subsp. vulgare
ggcgattatttctccccctttccccttagcgccgccggtcgccgccgccaccctcaccgcccgcgacgagacatgcccgccggccggaagcgcccagccccagcccccttcgccggcttctcaaccttcgcccgatccctcctcttctcccccgtctccggcttctccaggctgcctctcacctacgcccccgccgccaaaccccatcaagagaccgtcggcatgccgccgccgccttccaagcgcgcgaagcaggccgagccctccagcgacgaggaggaggagcgccccagcagcgacggcaacggcgacagcgacggcgacggcgacggcgacagcgacagctctcttgagtgctcgagcagcgacgacgacgacgacgcgtcgcaggagatggagacggtgcaggcggacttcgccttcttcgaccccaagcccaccgacttccacggcgtcaggctgctgctcaagacctacctcgactccaagccctgggacctcaccggcttcgtcgacctcgtcctggagcagaccaccgttggcaccgtcgtcaagatggccgaggatgaggatggggaagcaaatgggggtgacaggagcgacgagggcgacgacgatgatgaggacctgttcggcctcattaccgtgctcaatttgggaagatatggggagagccgttgcatcaaggatctgaaggaatatctgcttgctgtttgcggcgacaaggacaccaagaagaagctcaagtcactgctggaagagaaggcatctaccgtcggcctgctggtgtgccggcgctttgtgaatttcccctatgaaatggtgcctaagatgtatgattcactctttgacgaggtttcctgggcgacagaagatgagccaacgcaagaactccaggactccttccggttcaagcagtacctgttccttgtcagaatcttggagagaaaaactccaccaaagcagaaatcaaagaacaataaagatgaggatgaacctgttatctatccgaagttggaggacgaaatattacatgagcttagcacgtggtcatttactttcccaattcgcgccgaacagtcggcacagcaagagctgaagaactacaaggagatgggcctggtgatgtgcgtcaaagccgacgtgatcccgaagttccgcaagaagctggaggctttggtgtcggaataggcaggtctatttttgctcgtaggagaagaaatcccaagtgggattctgctgctgtccatccgcaagacgcaatgtcattgtgcaactgtcaccacagttgcacaaagaggctggttctgtagggaggggtcgtttatgaagtactccatacttttcatgtattcagtttttgccacaggatagattatattcatggagggtttctttggttgcgtgaaaacatgcatgtgtgacatttctgattcaactgaaatctgtgctccatgaaaatgctctggaatggcatacgtggaacccagaaaatgctactgtttggcacttgtattgtactttgtccgttcctg

SEQ ID NO: 4007 - DNA, 1146 bp, Zea mays; identical to SEQ ID NO: 1564

SEQ ID NO: 4008 - DNA, 1174 bp, Zea mays
atcacgcactctgccagagaccaaactattcgtatcgtgcgtaggtgttgcttgctgttgcaacggaccatccatctagtgcttgcattgctgtcgcactcgctcagctatctccaccgctattggttgttgtttggttacccacgccctgctctctgataccagttgatagcagcagcagctagctataggttgtcagcaggatcgaccagatagatagcgcgcgcggatcggagttaacagcgctgcaggatggtgaagagcacgacgacgatgggggcggcgagctgcggcggcggcgtgctgccgctggcgtcgctgaaccacatcagcatcgtgtgccggtcggtggaggcgtcgctgcgcttctacacggatgtgctcggcttcgtccccatccgccgccccggctctttcgacttcggcggcgcctggctgttcaactacgggatcggcatccacctgctgcagtcggaggaccccggcagcctcccgccggagaagggagagatcaaccccaaggacaaccatatctccttccagtgcgagagcatggtggcggtggagcggcggctgaaggagatcggcatcccgtacgtgcagcgctgcgtggaggagggcggcatcaacgtggaccagatcttcttccacgaccccgacggcttcatgatcgagatctgcaactgcgacaacctccccgtcgtcccgctcgccggcgaccagcagcgcgcgccggccgcttgcaggcgggctccggcggcggtcaataccgtcaagcagcagcagcagggcagcgtggtgcctgcttcttccgctccggtcacgacggcggcggcgcagtgcatgccgtcggcggccacggcggcgcaagccatccgcgtcgccgaggagtcgtcgtcgcacatttcgtgcgcgtgattactagcttgttgacgacgacgccagcgcaaggattcggcgcggacggtgacgaagcaggcacgatggatcgacgagcgccgagtcacggccacaagaggcgtctctgtacatgcgcgtgcgtgcgtgcgtgggtgtaggtgctgtatgtgcagtgcactcaaactgcctagcttttttttagtaaagaataaacccatggtacggtgggagtgaagagactagtgcgtccactccatcaaaaaaaaaaaaaaaa

SEQ ID NO: 4009 - DNA, 1371 bp, Sorghum bicolor
atcactcgatcggcatcggcaggcaggcacaactcgtatcgtatcgtagcagcaggttcctgttgcagcgtacgtacaaatcgtacacaaaaagcatatatagcccccatcatcggccatcgacctcaagtgatagcactcgatcggcagtttgtagaaggagctggaaaaagcagagcactcctcgctctgttagctagctgcttgccatctcctccctgctagctgctggcctctggtagtttgtagtagaagcagctatagctagtagcttgccatctccatcgatccaccagagggagagagcagagagagaggatggtgagcagcacgacgatggcggcggcgagctgcggcggcgtgagggcggcgggcgtgctgccgctggcgtcgctgaaccacatcagcatcgtgtgtcgcaacgtggaggcgtcgctgcgcttctacaccgacgtgctcggattcgtccccatccgccgccccggctccttcgacttcgacggcgcctggctgttcaactacgggatcggcatccacctgctgcagtcggaggaccccggcagcctcccggagaagggcgagatcaaccccaaggacaaccatatctccttccagtgcgagagcatggtggcggtggagcgtcgtctgaaggagatgggcatcccgtacgtgcagcgctgcgtggaggaaggcggcatcaacgtggaccagatcttcttccacgaccccgacggcttcatgatcgagatctgcaactgcgacaacctccccgtcatcccgctcgccggcgccgtccagctcgggtcatgcaagcgcgccgcggcggcggtcgtcgtcggcaagcagcagcagcagcaaagcagcgtcgtcgtcgtcgtgcctcctccttcccctccggtcaccgcgacggcggccgcgcatcatcaggctatccgcgtcgccgaggagtcgtcgtcgtcgcacatttcgtgcgcgtgatttgatgactacacgagaggatccatcggtcagtgtcgtgccggatcgtcgatgatgcatgccgtcgtcgtcacagcgagacggtgacgcattggatcatggcacgatggatttatcgatggagtcgtcacggccaagcgtagtctctctgtacatgcgcgtgcgtgcgttcgtgtgtagctggatgtgcaagcaaactgcccgtttttagtaaagaataaacgaaccaattaaggtggctccatcgatctatactaatagctactaagtggtgtcttctggtttctctatatttctttcagttttttttcagaagtaaagtacatacgtctttttttcaggaagtacaccattatctatataaaaaggaaattcagaaagtacacatccgtg

SEQ ID NO: 4010 - DNA, 1646 bp, Sorghum bicolor
gaaacgcatacagcaagtttgccggccgtcacatgttcttcaagctgatctctgatctgacatatatccccagctaacattgcaacctgcaacattgctcttagaactccacccctccattgttgcaagaaagcaagatcaagaaacaaccatggcggcgcatgtcctcgtcgtgcccttccccgcccaggggcacatgaaccccatggtacagttcgccaagaggctggcgtccaagggcgtggccaccacgctcgtgaccacccgcttcatccagagaactgctggcgtggacgcgcacccggcgatggtcgaggccatctccgacggccacgacgagggagggttcgcgtcggccgcgggcgtcgaggagtacctggagaagcagacggtcgccgcgtcggcgtcgctggcgtcgctcatcgaggcgcgcgcgtcgtcggcggcggaccccttcacctgcgtcgtgtacgacacgtacgaggactgggtgccgcccctggcgcggcggatgggccttcccgccgtccctttctccacgcagtcgtgcgcggtcagcgccgtatactaccacttcagccaggggagacttgccgtgccgccgccgccaccggccgcggacggcggcgacggtggtgccgctgccgcccggagcgaggcgttcctggggctgccggagatggagaggtcggagttcccgtcgttcgtgttcgaccatgggccgtatccgacgatcgccaagcaagcgctgaaacagttcgctcatgagggaaaggatgattgggtgctgttcaactcgttcgaagatctggaaagcgaggttttggctggactgacaaagtacatgaaggcccgagccatcggtccgtgcgtgccgctgcccgccgctgaaacgaccggcgccactggccgccggatcacctacggcgccaacctggtgaacccggaggacgcgtgcatcaagtggctagacaccaagccccaccgctccgtggcctacgtctccttcggcagcttcgcgtccctcgacgccgctcagacggaggagctcgcccgcggcctcctcgccgccgggaagcctttcctgtgggtggtgagggccaccgatgagcaccagatcccgcaccacctcctggacgaggcgacggcgtcgggcgccgcgatggttgtgccctggtgcccgcagctggacgtgctggcgcacccggccgtgggctgcttcgtgacccactgcggctggaactccacgctggaggcgctcagctacggcgtgcccatggtggcgatggcactgtggacggaccagccgactaacgctcggaacgtcgagctcgcctggcgcgccggtgcgcgcgctcgtcgcgacgcgggcgcgggcgcgggcgcgggaatgttcctgcgcggggaagtggagcggtgcgtgcgcgccgttatggacgacggcgaggaggcgtctgctgtgcgcaaggcggtggggacttggagggacaaggctcgcgcggcggtggcagccggcggcagctctgaccggaacctggacgagttcgtgcagttcgtgcgcgccggcgccacggagaagggcaaggcgctggttttgaagggaggtgacgttgcagggtccgagatgtgaatcatgtgacgaggga

SEQ ID NO: 4011 - DNA, 1416 bp, Zea mays
atggcgccgcatgtcctcgtcgtgcccttccccggtcagggacacatgaaccccatggtacagttcgccaagaggctggcatccaagggcgtggccaccacgctcgtcaccacccgcttcatccagaggactgccgacgtggacgcgcacccagcgatggtcgaggccatctccgacgggcacgacgagggagggttcgcgtcggccgcgggcgttgccgagtacctggagaagcaggcggccgccgcgtcggcgtcgctggcgtcgctcgtcgaggcacgcgcgtcgtctgcggacgccttcacgtgcgtcgtgtacgactcgtacgaggactgggtgctgcccgtggcgcggcgaatgggcctgcccgccgtccccttctccacgcagtcgtgcgccgtcagcgccgtgtactaccacttcagccaggggaggcttgccgtgcctccgggggcggccgcggacggcagcgacggtggtgctggtgccgccgccctgagcgaggcgttcctggggctgccggagatggagaggtcggagctcccgtcgttcgtgttcgaccatggtccgtacccgaccatcgccatgcaagcgattaaacagttcgctcatgcgggaaaggatgactgggtgctgttcaactcgttcgaagaactggaaaccgaggttttggctggcctgacaaagtacctgaaggcccgagccatcggcccatgcgtgccgctgcccaccgctggaaggaccgccggcgccaatggccggatcacctacggggccaacctggtgaagccggaggatgcgtgcaccaagtggctagacaccaagcccgaccgctccgtggcctacgtctccttcggcagcctcgcgtccctgggcaacgcccagaaggaggagctcgcgcgcggcctcctcgccgccggcaagccgttcctgtgggtggtgagggccagcgacgagcaccaggtcccgcgctatctcctggccgaggcgacggcgacgggcgccgcgatggtcgtgccctggtgcccgcagctggacgtgctggcgcacccggccgtgggctgcttcgtcacccactgcggttggaactccacgctggaggcgctcagcttcggcgtgcctatggtggcgatggcgctgtggacggaccagccgaccaacgctcggaacgtcgagctcgcctggggcgcgggcgtgcgcgcgcgccgcgatgctggcgcgggcgtgttccttcgcggggaagtggagcggtgcgtgcgcgccgtcatggacgggggcgaggcggcgtctgctgcacgcaaggcggcgggggaatggagggacagggctcgcgccgcggtggcacccggtggcagctctgaccgcaacctggacgagttcgtgcagtttgtgcgcgccggcgccacggagaagtga

SEQ ID NO: 4012 - DNA, 1738 bp, Zea mays; identical to SEQ ID NO: 1565

SEQ ID NO: 4013 - DNA, 3331 bp, Zea mays
atgaacctgaacctgaagcagcctctggtgctgcccgcgcaccacagcaatgtcgtcggctcgcgcctgtcgtcgtcgtcgccctcggcagccgccgccagcaggaggaccggcggcggcgtgtcctcccggtccggctcccggcggcacgtgcggctgccgaggatcagctgcagcgccaccgaggaggtcagcggcgccgtgtcgtccgtcaccgtggagaggatgctcacggtgacggcgtcggtggaggcgtcgccggccatcgggcagatgtacttccagcgcgccgtcgacgacatcggcgacctcctcggcaagacgctgctgctcgagctcgtcagctccgagctcgacgcaagtgagtatagtcactcatactgtcggccgtatggatcggatgggcgggcgccatgcatgcatgcatcctagctgttagtagctgagctagatccaacaataatggtggctactatatatccatggccattatattgctcacagcgactaaacgaaaatcactactgaaccgtggatttatatatatatatatatatatatatatatatatatatatatatagatgtgtggatgatgattatcataacaataatgaggggtgagaatatagttcaaatatatgtgtgcaagaaatatagatgctctccacaataatggacaaaaggacttgaactgcaagacgccataccatacgcgtacgactagacgagagtttgtcgtagaagactacgcgcgtacgtacgccgtagaaaataaagggaaaatctgagcttgtgagcatgcatgcatcatgcatgtggtgtggtggtgcactgcagagtcgggcgtggagaagacgcgggtgacggcgtacgcgcacaagacgctgcgggagggccactacgaggcggagttcaaggtgccggcgtcgttcgggccggtgggcgcggtgctggtggagaacgagcaccacaaggaggtcttcatcaaggagatcaagctcgtcaccggcggcgacagcagcaccgccgtcaccttcgactgcaactcctgggtgcactccaagttcgacaacccggagaagcgcatcttcttcaccctcaaggtacgtacgtcgatcagcatggtgaccgcgtgcatgcatgtatgctgactgacactcacggctgcttacttttctgtgcagtcatacctgccgtccgacacgcccaaggggctggaggacctgaggaagaaggacctgcaggcgctgcgcggcgacgggcacggcgagcgcaaggtgttcgagcgcgtctacgactacgacgtgtacaacgacctgggcgacccggacaagaacccggcccaccagcggcccgtgctgggcggcaacaagcagtacccatacccgcgccgctgccgcaccggccgccccaggaccaagaaggaccccgagacggagatgcgcgagggccacaactacgtgccccgcgacgagcagttctcggaggtgaagcagctcacgttcggggccaccacgctgcgctccggcctgcacgcgctgctgccggcgctccgcccgctgctcatcaacaagaaggatctgcgcttcccgcacttccccgccatcgacgacctcttcagcgacggcatcccgctgccggcgcagaccgggttcgacgccatccgcaccgtcgtcccgcgcatggtcaagctggtggaggacaccaccgaccacgtcctccgcttcgaggtgccggagatgatagagagtaagctagctagcagacgcactcatctcaggactgcttgttatcttaatcttaaaaaaaataaatgatttgctttgctaggggaccggttctcgtggttcaaggacgaggagttcgcgaggcagacgatcgcggggctcaacccgctgtgcatccagctgctgactgagttccccatcaagagcaagctggacccggaggtgtacgggccagcggagtccgccatcaccaaggagatcctggagaagcagatgaacggcgcgctgaccgtggagcaggcgctggcggcgaagcggctgttcatcctggactaccacgacgtgttcctgccctacgtgcacaaggtgcgggagctgcaggacgcgacgctctacgcctcgcgcaccatcttcttcctgacggacctgggcacgctgatgccgctggccatcgagctgacgcggcccaagtcgccgacgcggccgcagtggaagcgggcgttcacgcacgggcccgacgccaccgacgcctggctgtggaagctggccaaggcgcacgtgctgacccacgacacggggtaccaccagctggtgagccactggctgcgcacgcactgctgcgtggagccctacatcatcgccgccaaccggcagctgagccggctgcacccggtgtaccgcctgctgcacccgcacttccgctacaccatggagatcaacgcgctggccagggaggcgctcatcaacgccgacggcatcatcgaggagtccttctggccgggcaagtacgccgtcgagctcagctccgtggcgtacggcgcgacgtggcagttcgacacggaggcgctgcccaacgacctcatcaagcgcgggctggccgtgcgcggggaggacggggagctggagctcaccatcaaggactacccctacgcccacgacgggctcctggtctgggactccatcaggcagtgggcgtccgagtacgtcaacgtctactacaagtccgacgaggccgtggccgccgaccccgagctgagggcgttctgggacgaggtgcgcaacgtggggcacggcgacaagaaggacgagccgtggtggcccgtgctggacacccgcgacagcctggtggagacgctgaccaccatcatgtgggtcacctccggccaccactcggccgtcaacttcggccagtaccacttcgccggctacttccccaaccggccgaccaccatccggaagaacatgccggtggaggagggcgggccgggcgaggagatggagaagttcctcaagcagccggagacgacgctgctggacatgctgcccacgcagatgcaggccatcaaggtcatgacgacgctggacatcctctcgtcgcactcgcccgacgaggagtacatgggggagttcgcggagccgtcgtggctggcggagcccatggtgaaggcggcgttcgagaagttcggcggcaggatgaaggagatcgaggggttcatcgacgagtgcaacaacaacctggacctcaagaaccgctgcggcgccgggatcgtgccgtacgagctgctcaagcccttctccaagccgggagtcaccgggaggggc

SEQ ID NO: 4014 - DNA, 3069 bp, Zea mays
attcagatgaacatgaagcagcctctcgtgctgcccgcgcaccggggcaatgtcatcggctcgcgcctggcgtcgtcgccctctccggtggcggcggcggcggcggcggccagcaggcggaggggcgtcgtgtcctccccccgctcccggctccagcgccacatgcggctgccgaggatcagctgcagcgccaccgaggaggccagcggcgccgtgtcggccgtcaccgtggagaagatgctgacggtgacggcctcggtgcaggcggcgccggccatcggtcagatgtacttccagcgcgccctcgacgacgccggcgacttcttcggcaagacgctgctgatggaactcgtcagctccgaggtcgacgcaagtgagtagtagtgcgtgataccgtccgtctgttagtctgtatgtatatgtacctgaacctgatcgagcgagtctgaggctctgagcatgtgtggtggtggtggtgggtgcagagacgggtctggagaagccgcgggtgacggcgttcgctcacaagacgctgcgggagggccactacgaggcggagttcaaggtgccggcgtcgttcgggcccgtgggcgcggtgctgctggagaacgagcaccacaaggagatcttcatcagggagatcaagctcgtcacgggcagcgacagcagcaccgccgtcaccttcggctgcaactcctgggtgcactccaagttcgacaacccggagaagcgcatcttcttcaccctcaaggtcagccgtcacagcatgcatatagggcactgctgggaacttgctatagcctatagctgccagctagatgcatggcatatgaccgttgcttcgatcgatcgcgtgcgtgcagtcctacctgccgtccgacacgcccaagggcctggaggacctgaggaagaaggacctgcaggcgcttcggggcgacggccacggcgagcgcaaggcgtccgagcgcgtctacgactacgacgtgtacaacgacctgggcgacccggacaagaaccccgcccaccagcggcccgtgctgggcggcagcaagcggtacccgtacccgcgccgctgccgcaccggtcgccccaggaccaggaaggaccccgaggcggaggtgcgccatgggcacaactacgtgccccgcgacgagcagttctcggaggtcaagcagctcacgttcggggccacgacgctgcgctcgggcctgcacgcgctgctcccggccatcaggccgatgctcatcaagagggagctgcgcttcccgcacttcccggccatcgacgacctctacagcgacggcatcccgctgccggcgcagaccgggttgggcgccatccgcagcatcgtcccgcgcgtggtcaagctggtggaggacaccaccgagcacgtcctccgcttcgagctgccggacatgatagagagtaattaacgaagcatctccccgggccctcacatcaagaatacaatactaatagaaaataaattcaataatggcactaatcaatggctttgctttgctttgctttgctgttgcaggagaccgcttctcgtggttcaaagacgaggagttcgcgaggcagacgatcgcggggctcaacccgctgtgcatccagctcctgacggagttccccatcaggagcaagctggacccggaggtgtacggcccggcggagtccgccatcaccaaggagatcctggagaagcacatgagcggcggcgccgccatgaccgtggagcaggcgctcgcggcgaagcgtctgttcatcctggactaccacgacgtgttcctgccctacgtgcacagggtgcgcgagctgccggacacgacgctctacggctcccgcaccgtcttcttcctcacggacctgggcacgctgatgccgctggccatcgagctggtgcggcccaaatcgccgacgcagccgcagtggaagcgggtgttcacgcacgggcccgacgccaccgacgcctggctgtggaagcttgccaaggcgcacgtggtgacccacgacacggggtaccaccagctggtgagccactggctgcgcacgcactgctgcgtggagccctacatcattgccgcgaaccggcagctcagccggctgcacccggtgtaccgcctcctgcacccgcacttccgctacaccatggagatcaacgcgctggccagggaggcgctcatcaacgccgacggcatcatcgaggagtccttctggccgggcaggtacgccgtcgagctcagctcagcggcgtacggcgccacgtggcagttcgacacggaggcgctgcccaacgacctcgtcaagcgtgggctcgccgtgcgccgggacgacggcgagctggagctcaccatcaaggactacccctacgcgcacgacgggctcatggtctggaacaccataaggcagtgggcggccgactacgtcaacgtctactacaagtccgacgaggccgtcgccgccgaccccgagctgaaggcgttctgggacgaggtgcgcaacgtgggccacggcgacaagaaggacgagccgtggtggcccgtgctcgacacccgcgacagcctcgcggagacgctcaccaccatcatgtgggtcacctccggccaccactcggcggtcaacttcgggcagtaccacttcggcggatacttcccgaaccgcccgaccaccatccggaagagcatgcccgtggaggaggaggcgggccgggacgaagagatgaagaagttcctgaagcagccggagacgaccctgctggacatgctgccgacgcagatgcaggccatcagggtgatgacgacgctggacatcctctcgtcgcactcgcccgacgaggagtacatgggagagttggcggagccgtcgtggctggaggagcccatggtgaaggcggcgttcgagaagttcggcggcaggatgaaggagatcgagggattcatcgacgagtgcaacaacaacccggagctcaggaaccggtgcggagcagggatcgtgccgtacgaactgctcaagcccttctccaagccgggagtcaccgggaggggcatccccaacagcatctccatt

SEQ ID NO: 4015 - DNA, 3125 bp, Zea mays
tgcaacacggcatctaccccaccggactcactatatctacggcccatcagcatacgcacagaccgcgcgctcggtcgactactggctagcttgtttcagtcgtccgatctgatctacagaaaaagcaggggcagggcagctagccatgattcagatgaacatgaagcagcctctcgtgctgcccgcgcaccggggcaatgtcatcggctcgcgcctggcgtcgtcgccctctccggtggcggcggcggcggcggcggccagcaggcggaggggcgtcgtgtcctccccccgctcccggctccagcgccacatgcggctgccgaggatcagctgcagcgccaccgaggaggccagcggcgccgtgtcggccgtcaccgtggagaagatgctgacggtgacggcctcggtgcaggcggcgccggccatcggtcagatgtacttccagcgcgccctcgacgacgccggcgacttcttcggcaagacgctgctgatggaactcgtcagctccgaggtcgacgcaaagacgggtctggagaagccgcgggtgacggcgttcgctcacaagacgctgcgggagggccactacgaggcggagttcaaggtgccggcgtcgttcgggcccgtgggcgcggtgctgctggagaacgagcaccacaaggagatcttcatcagggagatcaagctcgtcacgggcagcgacagcagcaccgccgtcaccttcggctgcaactcctgggtgcactccaagttcgacaacccggagaagcgcatcttcttcaccctcaagtcctacctgccgtccgacacgcccaagggcctggaggacctgaggaagaaggacctgcaggcgcttcggggcgacggccacggcgagcgcaaggcgtccgagcgcgtctacgactacgacgtgtacaacgacctgggcgacccggacaagaaccccgcccaccagcggcccgtgctgggcggcagcaagcggtacccgtacccgcgccgctgccgcaccggtcgccccaggaccaggaaggaccccgaggcggaggtgcgccatgggcacaactacgtgccccgcgacgagcagttctcggaggtcaagcagctcacgttcggggccacgacgctgcgctcgggcctgcacgcgctgctcccggccatcaggccgatgctcatcaagagggagctgcgcttcccgcacttcccggccatcgacgacctctacagcgacggcatcccgctgccggcgcagaccgggttgggcgccatccgcagcatcgtcccgcgcgtggtcaagctggtggaggacaccaccgagcacgtcctccgcttcgagctgccggacatgatagagagagaccgcttctcgtggttcaaagacgaggagttcgcgaggcagacgatcgcggggctcaacccgctgtgcatccagctcctgacggagttccccatcaggagcaagctggaccgggaggtgtacggcccggcggagtccgccatcacaaaggagatcctggagaagcacatgagcggcggcgccgccatgaccgtggagcaggcgctcgcggcgaagcgtctgttcatcctggactaccacgacgtgttcctgccctacgtgcacagggtgcgcgagctgccggacacgacgctctacggctcccgcaccgtcttcttcctcacggacctgggcacgctgatgccgctggccatcgagctggtgcggcccaaatcgccgacgcagccgcagtggaagcgggtgttcacgcacgggcccgacgccaccgacgcctggctgtggaagcttgccaaggcgcacgtggtgacccacgacacggggtaccaccagctggtgagccactggctgcgcacgcactgctgcgtggagccctacatcattgccgcgaaccggcagctcagccggctgcacccggtgtaccgcctcctgcacccgcacttccgctacaccatggagatcaacgcgctggccagggaggcgctcatcaacgccgacggcatcatcgaggagtccttctggccgggcaggtacgccgtcgagctcagctcagcggcgtacggcgccacgtggcagttcgacacggaggcgctgcccaacgacctcgtcaagcgtgggctcgccgtgcgccgggacgacggcgagctggagctcaccatcaaggactacccctacgcgcacgacgggctcatggtctggaacaccataaggcagtgggcggccgactacgtcaacgtctactacaagtccgacgaggccgtcgccgccgaccccgagctgaaggcgttctgggacgaggtgcgcaacgtgggccacggcgacaagaaggacgagccgtggtggcccgtgctcgacacccgcgacagcctcgcggagacgctcaccaccatcatgtgggtcacctccggccaccactcggcggtcaacttcgggcagtaccacttcggcggatacttcccgaaccgcccgaccaccatccggaagagcatgcccgtggaggaggaggcgggccgggacgaagagatgaagaagttcctgaagcagccggagacgaccctgctggacatgctgccgacgcagatgcaggccatcagggtgatgacgacgctggacatcctctcgtcgcactcgcccgacgaggagtacatgggagagttggcggagccgtcgtggctggaggagcccatggtgaaggcggcgttcgagaagttcggcggcaggatgaaggagatcgagggattcatcgacgagtgcaacaacaacccggagctcaggaaccggtgcggagcagggatcgtgccgtacgaactgctcaagcccttctccaagccgggagtcaccgggaggggcatccccaacagcatctccatttgacccgtccgtcctctccatccaatgggggtttgccttattgcgtgcacgctagctagctgcttggaaataaaaataattaaaataaaaggtctcgtctgtactattgtattgtaccatggatcatatcgtacatgttgtgtcaatgcaaagaggcacgtttgagttaccattaggatgacattactagcagatcctttttaaaaaaaaaaaaaaaaaaaaaaaaaaaaaaaaaaaaaaaaaaaaa

SEQ ID NO: 4016 - DNA, 2708 bp, Zea mays
gtttcagtcgtccgatctgatctacagaaaaagcaggggcagggcagctagccatgattcagatgaacatgaagcagcctctcgtgctgcccgcgcaccggggcaatgtcgccggcgacttcttcggcaagacgctgctgatggaactcgtcagctccgaggtcgacgcaaagacgggtctggagaagccgcgggtgacggcgttcgctcacaagacgctgcgggagggccactacgaggcggagttcaaggtgccggcgtcgttcgggcccgtgggcgcggtgctgctggagaacgagcaccacaaggagatcttcatcagggagatcaagctcgtcacgggcagcgacagcagcaccgccgtcaccttcggctgcaactcctgggtgcactccaagttcgacaacccggagaagcgcatcttcttcaccctcaagtcctacctgccgtccgacacgcccaagggcctggaggacctgaggaagaaggacctgcaggcgcttcggggcgacggccacggcgagcgcaaggcgtccgagcgcgtctacgactacgacgtgtacaacgacctgggcgacccggacaagaaccccgcccaccagcggcccgtgctgggcggcagcaagcggtacccgtacccgcgccgctgccgcaccggtcgccccaggaccaggaaggaccccgaggcggaggtgcgccatgggcacaactacgtgccccgcgacgagcagttctcggaggtcaagcagctcacgttcggggccacgacgctgcgctcgggcctgcacgcgctgctcccggccatcaggccgatgctcatcaagagggagctgcgcttcccgcacttcccggccatcgacgacctctacagcgacggcatcccgctgccggcgcagaccgggttgggcgccatccgcagcatcgtcccgcgcgtggtcaagctggtggaggacaccaccgagcacgtcctccgcttcgagctgccggacatgatagagagagaccgcttctcgtggttcaaagacgaggagttcgcgaggcagacgatcgcggggctcaacccgctgtgcatccagctcctgacggagttccccatcaggagcaagctggacccggaggtgtacggcccggcggagtccgccatcaccaaggagatcctggagaagcacatgagcggcggcgccgccatgaccgtggagcaggcgctcgcggcgaagcgtctgttcatcctggactaccacgacgtgttcctgccctacgtgcacagggtgcgcgagctgccggacacgacgctctacggctcccgcaccgtcttcttcctcacggacctgggcacgctgatgccgctggccatcgagctggtgcggcccaaatcgccgacgcagccgcagtggaagcgggtgttcacgcacgggcccgacgccaccgacgcctggctgtggaagcttgccaaggcgcacgtggtgacccacgacacggggtaccaccagctggtgagccactggctgcgcacgcactgctgcgtggagccctacatcattgccgcgaaccggcagctcagccggctgcacccggtgtaccgcctcctgcacccgcacttccgctacaccatggagatcaacgcgctggccagggaggcgctcatcaacgccgacggcatcatcgaggagtccttctggccgggcaggtacgccgtcgagctcagctcagcggcgtacggcgccacgtggcagttcgacacggaggcgctgcccaacgacctcgtcaagcgtgggctcgccgtgcgccgggacgacggcgagctggagctcaccatcaaggactacccctacgcgcacgacgggctcatggtctggaacaccataaggcagtgggcggccgactacgtcaacgtctactacaagtccgacgaggccgtcgccgccgaccccgagctgaaggcgttctgggacgaggtgcgcaacgtgggccacggcgacaagaaggacgagccgtggtggcccgtgctcgacacccgcgacagcctcgcggagacgctcaccaccatcatgtgggtcacctccggccaccactcggcggtcaacttcgggcagtaccacttcggcggatacttcccgaaccgcccgaccaccatccggaagagcatgcccgtggaggaggaggcgggccgggacgaagagatgaagaagttcctgaagcagccggagacgaccctgctggacatgctgccgacgcagatgcaggccatcagggtgatgacgacgctggacatcctctcgtcgcactcgcccgacgaggagtacatgggagagttggcggagccgtcgtggctggaggagcccatggtgaaggcggcgttcgagaagttcggcggcaggatgaaggagatcgagggattcatcgacgagtgcaacaacaacccggagctcaggaaccggtgcggagcagggatcgtgccgtacgaactgctcaagcccttctccaagccgggagtcaccgggaggggcatccccaacagcatctccatttgacccgtccgtcctctccatccaatgggggtttgccttattgcgtgcacgctagctagctgcttggaaataaaaataattaaaataaaaggtctcgtctgtactattgtattgtaccatggatcatatcgtacatgttgtgtcaatgcaaagaggcacgtttgagttaccattaggatg

SEQ ID NO: 4017 - DNA, 2596 bp, Zea mays
cgacgacgccggcgacttcttcggcaagacgctgctgatggaactcgtcagctccgaggtcgacgcaaagacgggtctggagaagccgcgggtgacggcgttcgctcacaagacgctgcgggagggccactacgaggcggagttcaaggtgccggcgtcgttcgggcccgtgggcgcggtgctgctggagaacgagcaccacaaggagatcttcatcagggagatcaagctcgtcacgggcagcgacagcagcaccgccgtcaccttcggctgcaactcctgggtgcactccaagttcgacaacccggagaagcgcatcttcttcaccctcaagtcctacctgccgtccgacacgcccaagggcctggaggacctgaggaagaaggacctgcaggcgcttcggggcgacggccacggcgagcgcaaggcgtccgagcgcgtctacgactacgacgtgtacaacgacctgggcgacccggacaagaaccccgcccaccagcggcccgtgctgggcggcagcaagcggtacccgtacccgcgccgctgccgcaccggtcgccccaggaccaggaaggaccccgaggcggaggtgcgccatgggcacaactacgtgccccgcgacgagcagttctcggaggtcaagcagctcacgttcggggccacgacgctgcgctcgggcctgcacgcgctgctcccggccatcaggccgatgctcatcaagagggagctgcgcttcccgcacttcccggccatcgacgacctctacagcgacggcatcccgctgccggcgcagaccgggttgggcgccatccgcagcatcgtcccgcgcgtggtcaagctggtggaggacaccaccgagcacgtcctccgcttcgagctgccggacatgatagagagagaccgcttctcgtggttcaaagacgaggagttcgcgaggcagacgatcgcggggctcaacccgctgtgcatccagctcctgacggagttccccatcaggagcaagctggacccggaggtgtacggcccggcggagtccgccatcaccaaggagatcctggagaagcacatgagcggcggcgccgccatgaccgtggagcaggcgctcgcggcgaagcgtctgttcatcctggactaccacgacgtgttcctgccctacgtgcacagggtgcgcgagctgccggacacgacgctctacggctcccgcaccgtcttcttcctcacggacctgggcacgctgatgccgctggccatcgagctggtgcggcccaaatcgccgacgcagccgcagtggaagcgggtgttcacgcacgggcccgacgccaccgacgcctggctgtggaagcttgccaaggcgcacgtggtgacccacgacacggggtaccaccagctggtgagccactggctgcgcacgcactgctgcgtggagccctacatcattgccgcgaaccggcagctcagccggctgcacccggtgtaccgcctcctgcacccgcacttccgctacaccatggagatcaacgcgctggccagggaggcgctcatcaacgccgacggcatcatcgaggagtccttctggccgggcaggtacgccgtcgagctcagctcagcggcgtacggcgccacgtggcagttcgacacggaggcgctgcccaacgacctcgtcaagcgtgggctcgccgtgcgccgggacgacggcgagctggagctcaccatcaaggactacccctacgcgcacgacgggctcatggtctggaacaccataaggcagtgggcggccgactacgtcaacgtctactacaagtccgacgaggccgtcgccgccgaccccgagctgaaggcgttctgggacgaggtgcgcaacgtgggccacggcgacaagaaggacgagccgtggtggcccgtgctcgacacccgcgacagcctcgcggagacgctcaccaccatcatgtgggtcacctccggccaccactcggcggtcaacttcgggcagtaccacttcggcggatacttcccgaaccgcccgaccaccatccggaagagcatgcccgtggaggaggaggcgggccgggacgaagagatgaagaagttcctgaagcagccggagacgaccctgctggacatgctgccgacgcagatgcaggccatcagggtgatgacgacgctggacatcctctcgtcgcactcgcccgacgaggagtacatgggagagttggcggagccgtcgtggctggaggagcccatggtgaaggcggcgttcgagaagttcggcggcaggatgaaggagatcgagggattcatcgacgagtgcaacaacaacccggagctcaggaaccggtgcggagcagggatcgtgccgtacgaactgctcaagcccttctccaagccgggagtcaccgggaggggcatccccaacagcatctccatttgacccgtccgtcctctccatccaatgggggtttgccttattgcgtgcacgctagctagctgcttggaaataaaaataattaaaataaaaggtctcgtctgtactattgtattgtaccatggatcatatcgtacatgttgtgtcaatgcaaagaggcacgtttgagttacc

SEQ ID NO: 4018 - DNA, 3072 bp, Hordeum vulgare subsp. vulgare
gctagctactactactagctggctaatcagcggaagaacataacgtagatattggaccagctcgatccatcggcagcagcggctagctagcccttcccgggccagccatgatccatctgaagcagcctcttgtgctctccgcgcagagcagcaatgttgcctcgccgctcttcgtcgcgggcggccagcagaggcgggcgtccggcgcagggaggacctgctctgggcgccggctcagcgcgcgaaggataagctgcgcgtcgaccgaggaggccgtcggcgtctcgacgtccgtgacgaccaaggagagggcgctgacggtgacggccatcgtgaccgcgcaggtgcccacctccgtgtacgtcgcccgcggcctcgacgacatccaggacctcttcggcaagacgcttctgctcgagctcgtcagctccgagcttgaccccaagacgggaagggagagggagagagtgaaggggtttgcgcacatgacgctcaaggaggggacgtacgaggccaagatgtcggtgccggcgtcgttcgggccggtgggcgcggtgctggtggagaacgagcaccacagggagatgttcatcaaggacatcaagctcatcaccggcggcgacgagagcatcgccatcaccttcgacgtcgcctcctgggtgcactccaagttcgacgaccccgagccgcgcgccttcttcaccgtcaagtcatacctgccgtcgcagacgccgccgggaatcgaggcgctgaggaagaaggagctggagacgctgcgtggcgacgggcacagcgagcgcaagttccacgagcgcgtctacgactacgacacctacaacgacctcggcgaccctgacaagaacatcgaccacaaacgccccgtgctgggcaccaaggagcacccctaccctcgccggtgccgcaccggccggccaaagaccctctacgacccggagacggagacgaggagctcgccggtgtacgtgccgcgcgacgagcagttctcggacgtcaaggggcggacgttcagcgcgacgacgctgcggtcggggctgcacgccatcctgccggcgctggcgccgctgctcaacaactcgcagtgcttctcgcacttcccggccatcgacgccctctacagcgacggcatcccgctccccgtcgacgggcacggcggcaactccttcaacgtcatcaacgacgtcattcctcgtgtcgtccagatgatcgaggacaccaccgagcacgtcctccgcttcgaggtccccgagatgcttgagagggaccgattttcgtggttcagagacgaggagttcgcgaggcagacgctcgcagggctcaaccctatctgcatccgccgcctcacggaattccccatcgtgagcaagctcgacccggcggtgtacgggccggcggagtcggcgctgagcaaggagatcctggagaagatgatgaacgggcgcatgacggtggaggaggcgatggagaagaagcggctgttcctgctggactaccacgacgtgttcctgccgtacgtgcacagggtgcgggagctgccggacacgacgctgtacgggtcccgcaccgtcttcttcctgagcgacgagggcacgctgatgccgctggccatcgagctgacgcggccgcagtcgccgaccaagccgcagtggaagcgcgccttcacgcacggctccgacgccaccgagtcgtggctgtggaagctggccaaggctcacgtgctgacccacgacaccggctaccaccagctcgtcagccactggctgcgcacgcacgcctgcgtcgagccctacatcatcgccaccaaccggcagctcagccggatgcacccggtgtaccgcctgctgcacccgcacttccgctacaccatggagatcaacgcgctggcccgggaggccctcatcaacgccgacggcatcatcgaggaggccttctggcctggcaagtactccatcgagctcagctccgtagcctacggcgccgcctggcagttcaacacggaggcgctgccggaggacctcatcaaccgggggctcgccgtgcgcagggacgacggcgagctcgagctcgccatcaaggactacccgtacgccgacgacgggctcctcatctggggctccatcaagcagtgggcgtccgactacgtggacttctactacaagtcggacggggacgtcgccggcgacgaggagctgcgggcgtggtgggaggaggtgcgcaccaaggggcacgcggacaagaaggacgagccgtggtggcccgtgtgcgacaccaaggagaacctcgtccagatcctgaccatcatcatgtgggtcacgtccggccaccacgccgccgtcaacttcggtcagtaccattacgccgggtacttccccaaccgtccgacggtggtgcggaggaacatcccggtggaggagaaccgggacgacgagatgaagaagttcatggccaggccggaggaggtgctgctgcagagcctcccctcgcagatgcaggccatcaaggtgatggcgacgctggacatcctctcctcgcactcccccgacgaggagtacatgggagagtacgctgagccggcgtggctggccgagcccatggtgaaggcggcattcgagaagttcagcggcaggctcaaggaggcggagggcaccatcgacatgcgaaacaacaacccggagaacaagaacaggtgtggcgccggcatcgtgccgtacgagctgctcaagccgttctcagaaccaggggtcactgggagaggcatccccaacagcatctccatttgattgttgccccaggataagatatcattgcacgtaggattattaggaataagatgtacactatgtacgcacccagcagcgattgctaccggacatgacacggcccgggagaggcatctactagtgtgtccctgctattgtatgccgtgaattagtactaataaggttatttgaattgtgacctcaccgaatcctaattaggttaagaaaagagtgggcatctacgtgcattcctggacagaccatactgtaccgtatcatttggggcatgccatac

SEQ ID NO: 4019 - DNA, 3158 bp, Oryza sativa Japonica Group
ggagatcagaacgaatcatatcgttcaacgagcgtccggccggcgggcgacgcgctgtcgagcaagagcgccgccgcccgatcaatcgctcgccaccatgattcaccccaaccagccgctggcgctgtccgcggcgaagaacgcgagcaccgtcgtcgtcggctcgccgctcctcgcggcgtcgccggcctcctcccccgcggcggcgtgctgtagcagccagctgcagcagcggcgagccgccgggcccgggaggaggggcgccggtaggctcgcggcgccgaggtgcagcaccatcgagcaggccgccggcgtgtcgtcggccgtgacggtggacaggacgctgacggtgaccgccacggtgaccgtgcagccgcccatcggcgtcgtctacgccgcccgcggcatcgacgacctcaccgacctcatcggcaagacgctcctcctcgagctcgtcagctccgagctcgacccaaggacggggaaggagaaggagacggtgagcgcgttcgcgcacaggacgatgaagcaggacacgtacgaggcggagttcgccgtgccggcgacgttcgggccggtgggcgccgtgctggtggagaacgagcaccaccgcgagatgttcgtcaaggagatctgcctcgtcaccggcgccgacgactcctccgccgtcaccttcgactgcaactcctgggtccactccaagttcgacaaccccgaccgccgcatcttcttcaccgtcaagtcgtacctgccggcgcagacgcccaaggggatcgaggcgctgaggaagaaggagctggagacgctgcgcggcgacggcaccggcgagcgcaagttcttcgaccgcgtctacgactacgacgtctacaacgacctcggcgaccccgacttcaagatcgagcacctccgccccgtcctcggcggcgacgaacacccctaccctcgccgctgccgcaccggccgcccccacaccgagatcgatccgcggacggagaagaggagggggccggtgtacgtgcctcgggacgagcagttctcggacgtgaaggggatgacgttcagcgcgacgacgctgaggtcggggctgcacgcgatgctgccggcgctggagccgctgctggcgaaccaggagctgaggttcccgcacttcccggccatcgacggcctctacagcgtcggcatcccgctgccggcgcagctcgccgccgccggcgccgccactgccacggccggcggcgccgcggcctcctcctccacctccaccaacatcgtcggcggcgtcatcccccgcctcgtccgcatgatcgaggacaccaccgaccacgtcctccgcttcgacgtccccgagatgttcgagcgagataggttctcgtggttcagagacgaggagttcgcgaggcaggtgctggctggcgtcaaccccatctgcatccagctcctaacggagtttcccatcgtgagcaagctggacccggaggtgtacgggccaccggagtcggcgctgacgaaggagttgctggagagccagatcgtggagtcggtgacggtggaggaggcgatggcgcagcggcggctcttcatcctggactaccacgacgtgttcctcccctacgtgcaccgcgtccgcgagcggccggagacgacgctctacggctcccgcacggtgttcttcctcaccggcgccggcacgctgtcgccgctcgccatcgagctggcgcggccgcagtcgccaacgaggccgcagtggaggcgcgccttcgtccacgggcccgacgccacggcgtcgtggctgtggaagctcgccaaggcgcacgtcctctcccacgacaccggctaccaccagctcgtcagccactggctccgcacccactgctgcgtcgagccgtacatcatcgccgccaaccggcagctcagccggatgcacccggtgcaccgcctcctccacccacacttccgctacaccatggagatcaatgccctggccagggagagcctcatcaatgccgacggcatcatcgaggagtccttctggcccgggaggtacgccatggagctcagctccgtcgcctacgccgccacgtggcgcttcgacgccgaggccctgcccgaggacctggtgcgccgcgggctcgccgttcgacaggaggacggcgagctcgagctcaccatcaaggactacccgtacgccaacgacgggctgctggtctggaactccatcaagcagtgggcgtcggattacatcgacttctactacaagtccgacgaggaggtcgcctgcgacgaggaggtgcgggcgtggtgggaggaggtgcgcaccaaggggcacgccgacaagaaggacgagccgtggtggccggcggtggacacccgggacgggctcatcggcgtcttgaccaccatcatgtgggtgacctccggccaccacgccgccgtcaacttcgggcagtaccactacggcggctacttcccgaaccggccgacggtgatgaggaagaaaatgccggtggaggagaacaaggaggaggagatgaagaagttcatggagatgccggagcacgtgctgctggacaccatgccgtccaagatgcaggccatcacgatcatggcgacgctggacatcctgtcgtcgcactcccccgacgaggagtacatgggggagcacgccgagccggcgtggctggcggagccgagggtcaaggcggcgttcgagaggttcgcagggaggatgaaggagatcgagggcatcgtcgacgagcggaacaacgacccggagctcaggaacaggtgcggcgccggcatcgtgccgtacgagctgctcaagccgttctccacgcccggggtcaccgggaggggcatcccaaacagcatctccatctgagtttcgctagctaagatagctagctgcatttgggacaagattggagatggttaagatttgtacactaagatcatgtaccaacactaatagctcccgtgtatgcctgcctgccacgggagaggcatttgctagtgtgtttgagttactagaatgccacaaattagtaaagaggttattgaactaaagctcagttcgctgagttttctagaaattggcagtatgtcatgcggacggatgggatctgctggattcagcacatatcatccaagaaaaattactc

SEQ ID NO: 4020 - DNA, 2016 bp, Sorghum bicolor
atgtcctccaacacaaagcctgctgtgtccatgcttctacaactcctctttctcagcctcaacctactagcagccttcacaacgggtgatggccagcagttcgtctactccggcttctccaacaatgaccttctcgtcgacggagctaccatgatcacatcaaatggcctccttgagctcaccaatggaaccgatcagcagataggccatgccttctacccaactccactgcggttcacgaggtcgccaaatggaacagtgcagtctttctccacctcctttgtgtttgcaatccagtccgtatacaccgacctaagtgcccacggcatggccttcattgtggcgccaagccgaaacttctcggccgcattgcctgggcagttcctaggcctcaccgacatccagaacaatggcaatagcagcaaccacttcttcaccgtcgagctcgacaccatcgagaacaaggagttcagtgacatcaatgccaaccatgccggcgccaacgtcaatggtctcaaatctctgaattcaagctctgctggctactatgctgatgaggatggtaaatttcacaacttgagtctgattagccgtgaggctatgcaagtgtggatggactatgatgacagcgtttcaagcatcacggttaccatggctccattgaaggttgcccgacctaaaaagccactgttcacaaccacctacaacctcacaagtgttgttactgatgttgcatacattggcttctcctctgcaactggcacaatcaatgtaaggcattatgtgcttggctggagtttcaacatgagtggtcctgctccatccattgatatctctaggctaccggagttgccacgtatgagccccaagcagtccaaggtattgcaaattgttctgccaatagcatcagcggcattcgtcctcgctgtgggcaccgtcgtgttcctactcgtccggaggcatttgaagtatgctgagctgcgagaagattgggaagttgagtttggaccgcaccgattctcctacaaggatttgttctatgcaacggaaggattcaaggacaaacacctcttaggcattggaggatttgggagggtatacaaggggatccttccggtgtccaaattggaggtagcagtgaaaagagtatctcatgattcaaggcagggcatgaaggaattcattgcggaggttgttagcataggacgtatccaacatcgcaatctcgtgcgtgttcttggctattgcagaagaagaggggaactgtttttggtgtatgagtacatgccatgtggaagtgttgacaagtacctgtatggaatagaagggaagccaattctgagttgggctaataggtggcacattatcaagggcattgcatcttgtttggtctacctccatgaggagtgggagaaagttgtcatccaccgggatatcaaaccaagtaatgttcttctagatggtgacatgaatggacgacttggtgattttggccttgctaggttatatgaccatgacactgacccacaaaccacacacgtggttggaacaatagggtaccttgctccagagctaggacatactagcaaggcaacacctcttactgatgtgttttcttttggcacgtttcttcttgagatcacatgtggcaggaggcctatcagtgaaagctcacaagaaagtcagtgtatgctggtcgattgggttcttgagcgttggatcagtggatcactgctagaaactgtggatagcaggcttcagggaaactataacactgcagaggcttgtttggctctaaagctaggactgttatgctctcatccattctccaactcaaggcctaccacgcggcaggtcatgcagtaccttgatggtgagatgtcgttaccagagatgacaccaacagacatgagctttcacatgatggcgataatgcagaatcaaggatttgatgactacattacgggatcgacagcaagcattggtacaacatctgttgtttctagtggaagatga

SEQ ID NO: 4021 - DNA, 2245 bp, Zea mays
cagcgatccgataccatgtccatgcttctacagttcctctttctcagcctcatcctactcgcagcgtccactacgggtggtgatggccagcagttcgcctactccggcttctccactaacgatctcgtcgtcgacggagctacaaccatcacatcaaacggcctcctcgagctcaccaacggaacggaccagcagacaggccacgccttctacccaaccccggtgcagttcacgaggtcgcccaacggaacggtgcagtctttctccacctccttcgtgttcgcaatcctgtccgtgtacaccgacctaagcgcccacggcatggccttcgtcgtggcgccgagcaggaacttcccgggcgccttgcctgggcagttcctcggcctcaccgacatccggaacgacggcaacgcgagcaaccacttcttcaccgtcgagctggacaccatcgagaacaaggagttcggcgacatcaacgccaaccacgccggcgccaacgtcaacggcctcagatccctcaactccagctccgctggctactacgctgacggggacgtcaacggcggcgagttccacttccacaacctgagcctgatcagccgtgaggctatgcaggtgtggatggactacgatgccacggcttcaagcatcacggtcaccatggctccgtcgaaggctgcgcggcctgcacggccgctgttcacagccacccacaacctcacaagcgtcgtcaccgacgctgcatacgttggcttctcctcggcgaccggcacgatcaacacgaggcattacgtgctcggctggagcttcgccatgaacggtccagctcccgccattgatgtttccaggctacccaagctcccacgcatgggcccgaagcctctatccaaggcactggagatcgttctgccgatagcaacggccgcgttcgtcctcgccgtgggcagcgccgcgttcctgctcgtccggaggcatctgaagtacgctgagctgcgggaagactgggagctcgagttcgggccgcaccgcttctcctacagggacctgttggatgcaacggaagggttcaaggacgagctcctgctcggcgtcggagggttcgggcgggtgtacaaggggacccttcccgtgtcgaaactggaggtggcggtgaaacgagtgtcccatgactcgaggcagggcatgaaggagttcatcgcggaggtcgtcagcatcgggcgcatccagcatcgcaacctcgtgcgtgttcttggctactgccggagaaggggcgagctgttcttggtgtacgagtacatgccgagcggaagtgtcgacaagtacttgtacggcaataatgaagggacgacgaggcccgtcctgagttgggagcacaggtggcgcgtcgtcaagggcatcgcgtcttgcttgctctacctccacgaggagtgggagcaggtggtcgtccaccgggatatcaagccgagcaatgtccttctggacagcgacatgaacgggcgactcggcgacttcggccttgccaggctgtacgaccacgacgctgacccacaaaccacgcacgtggtcggaaccatagggtaccttgctccggagctagggcacacgagcaaggcgacgcctcagacggacgtgttctctttcggcatgtttgttctcgagattacatgtggcaggaggcctgtcgtcgtcgtcgtcgtcggtgacgacgaaagctcacaggaggaaagccagtgcatgctggtggattgggtccttgagcgttgggcaagcagtggagcactgctggaaactgtggatgccaggcttggaggggactacaacgctgcggaggcttgtttggcactaaaactagggctgctatgctctcaccccttctccaagtcgaggcctaccgcacggcaggtcatgcagtaccttgacggtgaggtgccgctaccggagatggcgccaacggatatgagccttcacatgatggcgataatgcagaatgaaggattcgatgactacgtcgtcacgggatccacagcaagcattggtacaacatctgttgtttctggtggaagatgaggtatatactgctatatatgcatgtagacgtagcctgtagcatacgttttgggcgttccatcaccggagtatatgtaaggtttaccatcctaataaatatatgtgactttgtaataagttgtaacactagcaacactaccggaattcgactctttaccaaaaaaaaaaaaaaaaaaag

SEQ ID NO: 4022 - DNA, 2100 bp, Oryza sativa Japonica Group
atgtcctccagtacgttagtgctcctgcagctcctataccttattagccttatcctaccagccttctctgccaacgatgacaaccaattcgcctactctggcttctctggtgctaacctgaccatggatggtgcaactatcacatcaggtggcctcctagagctcaccaatggcacagtccagcagaagggccatgcattctacccggtcccgttgcgctttgtccgatcacccaatggatcagtgctctccttctcggcatccttcgtattcgccatcctatctgtctacactgatctaagtgctcatggcatggccttcgtcattgtgccaagcatgaacttctcagctgcgttgcctggccaattcctgggcctcgccaacatccagagcaacggcaatagcagcaaccatttcttcgctgtcgagctcgacaccatccaaaacaaggagtttggcgacatcaatgcaaaccatgccggcgtcaacatgaacggtctccgatcagagcagtcctactacgccggctactacgatgacaaggatggtaacttccataacttgagcctgattagccgtgaggccatgcaggtgtgggtggactacgatagcaacaacacgcagatcactgtggccatggctcccatcaaggttgcgagacccatgaagccattgttcacagccagctacaacctcacatctgtgattacagatgttgcgtatgttggtttctcctctgcaactggcacaatcaacgtgcggcattgtgtactcggctggagctttgcgataaatagtcctgcttcagccattaacttaggtaagctaccaaagctgccacgcatgggcccaaagccacgatcgaaggtattggagattgttctaccagtagcaacggcaagttttgtccttactgtgggcattattggtcttgtactcatacgaaggcatatgaggtatacagaactgcgcgaagattgggaggttgagtttggaccgcaccggttctcttataaggatctgtatcatgcaactgaaggattcaagaatgagaatctgctgggtgtaggaggatttgggagagtatataagggtacccttccagtgtcaaaattggagattgcagtaaagagggtgtgtcatgaatcaaggcaaggaatgaaggaatttgttgccgagattgttagtattggtcgtctccaacaccataatctcgtgcaattacttggctattgtagaagaagaggtgagctgttcttagtgtatgactacatgccaaatggaagtgttgacaaatacatacatagtatagagggaaaaaccattctaacttgggcccaaaggtggcatatcatcaaaggcattgcatcttgcttggtctatctccacgaagagtgggaaaaagctgttatccatcgggacataaaagctagtaatgttcttcttgatggcgatatgaacggacgacttggtgactttggccttgcaagattgtatgatcatgatgatgacccacaaaccacgcatgtggttggaacaataggatacctagctccagaactaggacacactagcaaggcgacccctcttactgatgtatttgcttttggcatgtttgttctcgaggttgcctgtgggcagagacccatcaatcaaagttcacttgatagccaaacgatgttagttgactgggtgcttgagcaatggaacaaaggatcactagtcagtacagtggatagcaggcttgaaggaaattataatgttagagaggcagttttagctataaatcttggacttttatgctctcacccttttgctaatgcaaggccttctatgcggcaggtcattcattaccttgatggtagcattccattaccagagatgtcaccaacagatttgagctatcatatgatgacaataatgcaaaatgaagggtttgacgagtacatcatgacaagttcatcgatgagtgaaatgctcaggcattccagcagcacgtctgcaggtttgcgtcgcaagtggctcaagcgatctgggaggaatgggaatggtgcaactggcctgggaggatactgcagcagggctcctttctttgtgtag

SEQ ID NO: 4023 - DNA, 3074 bp, Zea mays
ccacgcgtccgggtgctcagcggaacagctagctatagcctgtagctagcagctagcttcagtcacaggccggacggtcggctcacacacagctagccgccgccgccgctagcttagccaccagtagtccgatctgatctacaggcaaggggcaactagctagctagccgcgcgccggcgccatgatgaacctgaacctgaagcagcctctggtgctgcccgcgcaccacagcaatgtcgtcggctcgcgcctgtcgtcgtcgtcgccctcggcagccgccgccagcaggaggaccggcggcggcgtgtcctcccggtccggctcccggcggcacgtgcggctgccgaggatcagctgcagcgccaccgaggaggtcagcggcgccgtgtcgtccgtcaccgtggagaggatgctcacggtgacggcgtcggtggaggcgtcgccggccatcgggcagatgtacttccagcgcgccgtcgacgacatcggcgacctcctcggcaagacgctgctgctcgagctcgtcagctccgagctcgacgcaaagtcgggcgtggagaagacgcgggtgacggcgtacgcgcacaagacgctgcgggagggccactacgaggcggagttcaaggtgccggcgtcgttcgggccggtgggcgcggtgctggtggagaacgagcaccacaaggaggtcttcatcaaggagatcaagctcgtcaccggcggcgacagcagcaccgccgtcaccttcgactgcaactcctgggtgcactccaagttcgacaacccggagaagcgcatcttcttcaccctcaagtcatacctgccgtccgacacgcccaaggggctggaggacctgaggaagaaggacctgcaggcgctgcgcggcgacgggcacggcgagcgcaaggtgttcgagcgcgtctacgactacgacgtgtacaacgacctgggcgacccggacaagaacccggcccaccagcggcccgtgctgggcggcaacaagcagtacccatacccgcgccgctgccgcaccggccgccccaggaccaagaaggaccccgagacggagatgcgcgagggccacaactacgtgccccgcgacgagcagttctcggaggtgaagcagctcacgttcggggccaccacgctgcgctccggcctgcacgcgctgctgccggcgctccgcccgctgctcatcaacaagaaggatctgcgcttcccgcacttccccgccatcgacgacctcttcagcgacggcatcccgctgccggcgcagaccgggttcgacgccttccgcaccgtcgtcccgcgcatggtcaagctggtggaggacaccaccgaccacgtcctccgcttcgaggtgccggagatgatagagagggaccggttctcgtggttcaaggacgaggagttcgcgaggcagacgatcgcggggctcaacccgctgtgcatccagctgctgactgagttccccatcaagagcaagctggacccggaggtgtacgggccagcggagtccgccatcaccaaggagatcctggagaagcagatgaacggcgcgctgaccgtggagcaggcgctggcggcgaagcggctgttcatcctggactaccacgacgtgttcctgccctacgtgcacaaggtgcgggagctgcaggacgcgacgctctacgcctcgcgcaccatcttcttcctgacggacctgggcacgctgatgccgctggccatcgagctgacgcggcccaagtcgccgacgcggccgcagtggaagcgggcgttcacgcacgggcccgacgccaccgacgcctggctgtggaagctggccaaggcgcacgtgctgacccacgacacggggtaccaccagctggtgagccactggctgcgcacgcactgctgcgtggagccctacatcatcgccgccaaccggcagctgagccggctgcacccggtgtaccgcctgctgcacccgcacttccgctacaccatggagatcaacgcgctggccagggaggcgctcatcaacgccgacggcatcatcgaggagtccttctggccgggcaagtacgccgtcgagctcagctccgtggcgtacggcgcgacgtggcagttcgacacggaggcgctgcccaacgacctcatcaagcgcgggctggccgtgcgcggggaggacggggagctggagctcaccatcaaggactacccctacgcccacgacgggctcctggtctgggactccatcaggcagtgggcgtccgagtacgtcaacgtctactacaagtccgacgaggccgtggccgccgaccccgagctgagggcgttctgggacgaggtgcgcaacgtggggcacggcgacaagaaggacgagccgtggtggcccgtgctggacacccgcgacagcctggtggagacgctgaccaccatcatgtgggtcacctccggccaccactcggccgtcaacttcggccagtaccacttcgccggctacttccccaaccggccgaccaccatccggaagaacatgccggtggaggagggcgggccgggcgaggagatggagaagttcctcaagcagccggagacgacgctgctggacatgctgcccacgcagatgcaggccatcaaggtcatgacgacgctggacatcctctcgtcgcactcgcccgacgaggagtacatgggggagttcgcggagccgtcgtggctggcggagcccatggtgaaggcggcgttcgagaagttcggcggcaggatgaaggagatcgaggggttcatcgacgagtgcaacaacaacctggacctcaagaaccgctgcggcgccgggatcgtgccgtacgagctgctcaagcccttctccaagccgggagtcaccgggaggggcatccccagcagcatctccatctgatccatcctcagcatgcattagtccaattaaatcggggggtgtactattattgcatgcagaggctgcttgtcgaataaaacgtactatatgtacgattgtattgtacatgtgtgtcaatgcaacaagaggcacgtttgagactttgagtttaaaaaaaaaaaaaaaaaaaaaaaa

SEQ ID NO: 4024 - DNA, 1464 bp, Zea mays
cgacgagagtggaggagggctgctgatgggcggaggagacgaccggagagcggcggcgctccagcgatcctcgccatggagcgtgggcgagcggtggcgggcgcacgccgggatggtcctcgtcatgctcgcctacagcggttaccacgtcctcgccaagtccgtcctcaacgtgggcatgaaccaggtcgtcttctgcgtctaccgcgacctcctcgcgctcctcgtcgtcgcccccgtcgccttcctccgcgagagaagggttaggcctcccgtgacgcctcagctcctcgcttccttcgctctgcttggcttcactgggctgtatgggaacccgctcctctgcctcgtcggcctccgctacacaaacgcctcctacgccgcggctttccagccctccataccagtgctcacgtttctcttggctgccattgtcggtgttgaagcgatcagcgtcttcaccaaggacggcatcctcaaagtcaccggcacggccgtgtgcgtctccggcgccattctgatggccctgtaccgaggcccatccttgatcgcccttcttagaagcatgcccaccgcatggacgagcgctccctaccaccctgctacccccgactggttcacaccagccgtgcccgtgctcgagcagggtgtagaagcatggcagcttggcgtcctgtgcctcataggaaactgcctcttggtggctgtctatctagtcgtgcaggctccagtgatgataaagtatcctgcgagcttatccgtgacagcttactcctattttttcgccacaacctttatggtgctaactggagtatgcgcgactagtggcttacacgagtgggcactgacaaaagccgaggtcatagctgttctgtatgctggaattgtcgcatcctgtctgagctactcgatcatgacatgggcgaacaaagttcttggaccttctctggtcgccctctacaatccactgcaaccagccttttccaccgccctctcaactgttttccttggcgacccagtttacctcggaagcgttattgggggagtctctataattgctggtctctatctggtcatctgggctcgctacaatcaagggcagcgggcgcctacggatggttgtttggaccctcttattattgtggataatccaagaatccacaagacacaagaaagtcccttcgtgtagatcctgaaaaaaatgtgtggattatccacacatttgtataggtggtcttaaaagacagtatacttctatttgttaaacttcacatatgcattcaaataaacaagtggtcaaagattgtagtgaacctaggctctaattagaattgtatgttttgtagaacatttttataggctattcacctatctctagccatctagatcctatcagtcaccctgtaaaaatccatatagtccttcaatcgttggaaacagataaggatccattttgacataagg

SEQ ID NO: 4025 - DNA, 1173 bp, Sorghum bicolor
atgggagatgagagcaacgagcgggaggggacgctgctccagcggtgctcgccacacctctgctccgtcacggcatggcgggcgcacgccgggatggtcctcgtccagctcgccttcagcggctaccacgtcctcaccaaggccgtcctgaacgccggcatgaaccaggtcgtcttctgcgtctaccgcgacctcgccgcgctcgccatcctcgcccccgtcgccttcctccgcgagagaaggttgaggcctccggtgacccctcagctcgtcgcatgcttcgctcttcttggcttcactgggctcttcgtgaacccgctcctcttcctcgtcggcctccgctacaccaacgcttcctacgccgcggcgttcgagccctcggtgccagtcttcgcgtttctcttggctgtgattgccggcgttgaagcgatcaacatcttcagcaaggacggcatcctcaaagtcatcggcacagtcgtgtgcgtctctggtgcccttctgatggctctgtacagaggcccgtccctgattggtctcctgggaggcgccactgcatcaccagcaagtgaaaatgtcaccaccattattcctgctgctaaatggctgacatctaccgagctcgagggtggtgtagaaacatggtttcttggtgccctgtgccttataggacactgtttcttggtgggtgcttatctagtcatgcaggtttctgtgattaaaaggtatcctgcaagcttatccttgactgcttattcctatttttttgctactgtctttatggtgttcactggagtagttgcaaccaatgggctccatgagtgggcactgacaaacactgagatcatagctgttctatacgctggaattgttgcatcttgtatgagctatgcactcatgacatgggcaaacaaaattcttggaccttcgctggttgccctctataatccactccaaccagctttttctaccgtcctctctactatttttcttggtgccccagtttatgccggaagcattattgggggagtcttcataattgctggcttatatctagttacatgggctcgctacaatgaagtgcagcgaacaacgacagatgattatttggaccctcttcttgtgggtcatccaagaatcactaagacacaagaaagttctttcatggatccttaa

SEQ ID NO: 4026 - DNA, 1333 bp, Sorghum bicolor
aaaacccttctctcctcctttcgccctcaccctctcgcggccccaggagaagccgccgccgccgccgccgctgccgctgcgtgcgcgtccgcaggccgcagccacagcaggcgaccgagatggcgggagggttcgtcaagacccagaagaccaatgcgtacttcaagcgtttccaagtgaagttcaagagaaggcgtgctggtaagacagactacagggcaaggataaggttgattaaccaagacaagaacaagtacaatacgcccaaataccgattcgttgtgcgatttaccaacaaagacatcactgcacaaatcgtatctgcaagtattgcgggtgatatggttcttgctgctgcctattcccatgagctgccacgatacggtctagaagttggtctgaccaactatgctgcagcctactgtactggtcttcttttggctcgtcgcgtgctcaagatccgtgatttggatcaggagtatgagggcaatgttgaggccactggtgaggacttctctgtcgagccagctgaagggaggaggcctttccgtgcactcttggatgtcggcctaattaggactaccactggaaaccgtgtctttggtgccctgaagggagctttggatggtggtctggatattcctcacagcgataagaggtttgctggctttaagaaggatgataagcagctggatgctgatatccaccgcaagtacatctatggtctccatgttgctgagtatatgaagaatctggctgatgaggagcccgagaagtaccaggctcacttcagtgagtacatcaagaagggaattgaggctgatgacatggaagctctgtacaagaaggtccatgctgccatccgtgctgatcctagcatggccaagtcaacaaagacgccaccaaaggagcacaagaggtacaaccccaagaagttgacctatgagcagaggaaggctagcctcgtggaaaggctcaacgccctcaattcctctggcgatgctgatgatgacgaggatgacgagtgaagtgctagtcgcgtcacagtagtgctatcttatttggagatcagaacttgcgcaatggtgtttattgttccctgtagtcctgcaacaagcatttttgtttgagttttgagctggagacatggagttgatggattatcttaactaaagatgtggtgtctgttgaccttgctctttttgtcccttgattttgtcagtccttaatggcttcccttggtttatagtgtcaggataattcagtctgtggctttctgtcctgttgtttggcttttcgttttatggtggattaatgtggtgttctgtatttt

SEQ ID NO: 4027 - DNA, 1475 bp, Zea mays
cccgtccaccggctagggtttccccagagttaaaaggcccggaggaggcgcccctataaacccttcccttctgtcgctgctcccacctctagcccgacaggtgaagccgccgccgctgcagtgtccatagccaccgcaggagactgagatggggggttttgtcaagacccacaagagcaatgcgtacttcaagcgtttccaggtgaagttcaagagaaggcgcgctggcaagacagactacagggccaggataaggctgattaaccaagacaaaaacaagtacaatacacccaaatacagatttgttgtgcgatttaccaacaaggacatcacagcacaaatcatctctgctagtatagcaggtgatatggttcttgcttctgcttactcgcatgagttgccacgatatggtcttgaagttggtctgaccaactatgcagctgcctactgcactggccttctgttggctcgccgtgtgctcaagacccgtggtttagataaggaatatgagggcaatgttgaggccactggtgaggatttctctgttgagccagctgatgagaggaggcctttccgtgctctcttggatgttggccttattaggactacgactgggaaccgtgtctttggtgccctcaagggagctttggatggtggcctggatattcctcacagcgagaagaggtttgctggtttcaagaaggatgacaagcagctggatgctgatatccatcgcaagtacatctatggtggccatgttgctgactacatgaggaacctcgctgaagaggagccagagaagtaccagtctcacttcagtgagtacattaagaagggaattgaggctgacgacatggaagctctgtacaagaaggtccatgctgccatccgtgctgatccttctgtggtcaagtcaaccaagcagccaccaaaggagcacaagaggtacaaccccaagaaactgacatacgagcagaggaaggccagtctcattgaaaggctcaaccaactcaactcctcgggcggcgcagatgacgacgacgaggatgacgagtaaagtttcgtcccatcgaagtagtgctatcttatgcggcgatcagtatttgtgctatggcatttatcgctacctgtagtcgtgcaacatgcatttttgtttaagtttgtcgatgcgaacaaagttgtttctgttagtttggagctggagttctgaatatttacttttataatattaaaattggaccgagtcgaacaaaaaaaaaaaaaaaaaaatcaagagttcgcacgaggtggcccggcgagcatgtgtcgtgccgccgtcgtcagagattcctagtcctagttgaggtcgaggagcttcagcagtcaccctcaccggacaaagtgagtcgaaagctgaaagtgaagaataatcatgttcttacagttttaccgtctgatacgtaccagttttttyttctacaaaaaaaaaaaaaaaa

SEQ ID NO: 4028 - DNA, 1161 bp, Zea mays
ctctcgctcgccaggagaagcagccgccgttgctgctgccgcgtccacagaatggggggtttcgtgaagactcataagaccaatgcgtatttcaaacgtttccaagtgaaattcaagagaaggcgggctggcaagacagactacagggccaggataaggctgattaaccaagacaaaaacaagtacaacacacccaaatacagatttgttgtgcgatttaccaacaaggacatcactgcccaaatcatatctgctagtatagcgggtgatatggttcttgcttctgcctactcgcatgagttgccacgatatggtcttgaagttggtctgaccaactatgcagctgcctactgcactggccttctgttggctcgccgtgtgctcaagatccgtggtttggatcaggagtacgagggcaatgttgaggccactggtgaggacttctctgttgagccagctgatgagaggaggcctttccgtgctctcttggatgttggccttatcaggactacaacagggaaccgtgtctttggtgccctcaagggagcattggatggaggcctggatattcctcacagcgagaagaggtttgctggattcaagaaggacgacaagcagttggatgctgatacccaccgcaggtacatctatggtggccatgttgctgactacatgaagaaccttgctgaagaggagccagaaaagtaccagagccacttcagtgcgtacattaagaagggagttgaggctgatgaaatagaagcgctgtacaagaaggtccatgctgccatccgtgccgatccttccattgttaagtcaaccaagcagccaccaaaggagcataagaggtacaaccccaagaagctgacatatgagcagaggaaggccagcctcattgaaaggctcaaccaactcaactcctccggtggtgctgatgacgacgatgaggacgacgagtaaagttaattgccatcgaagtagtgctatctcaatccagcgatcagcaattgtgtactgtcttatgcggggacctgtagtactgcaataggcatttttgtttaagttttgcgaggtgaacaaaactgtttctgttagtttcgagcttgagctctcaatgtttactctttacattgaaatgctgccgtttggacatgttttttc

SEQ ID NO: 4029 - DNA, 1183 bp, Zea mays
aaaaaaacccttccattcacccgcagctcccatcctctcgctcgccaggagaagcagccgccgttgctgctgccgcgtccacagaatggggggtttcgtgaagactcataagaccaatgcgtatttcaaacgtttccaagtgaaattcaagagaaggcgggctggcaagacagactacagggccaggataaggctgattaaccaagacaaaaacaagtacaacacacccaaatacagatttgttgtgcgatttaccaacaaggacatcactgcacaaatcatatctgctagtatagcgggtgatatggttcttgcttctgcctactctcatgagttgccacgatatggtcttgaagttggtctgaccaactatgcagctgcctactgcactggacttctgttggctcgccgtgtgctaaagatccgtggtttggataaggagtatgagggcaatgttgaggccactggtgaggacttctctgttgagccagctgatgagaggaggccattccgtgctctcttggatgttggccttatcaggactacaacagggaaccgtgtctttggtgccctcaagggagctttggatgggggcctggatattcctcacagcgagaagaggtttgctggattcaagaaggatgacaagcagttggatgctgatacccaccgcaggtacatctatggtggccatgttgctgactacatgaagaaccttgctgaagaggagccagaaaagtaccagagccacttcagtgcgtacattaagaagggagttgaggctgaggaaattgaagccctgtacaagaaggttcatgctgccatccgtgctgatccttcggttgttaagtcaaccaagcagccaccaaaggagcataagaggtacaaccccaagaagctgacatatgagcagaggaaggccagcctcattgaaaggctcaaccaactcaactcctccggtggtgctgatgacgacgatgaggacgacgagtaaagtttagtgccatcgaagtggtgctatctcaatccagcgatcagcaattgtgtactgtcttatgcggggacctgtagtactgcaataggcatttttgtttaagttttgcgaggtgaacaaaactgtttctgttagtttcgagcttgagctctcaatgtttactctttacattgaaaaaaaaaaaaaaaa

SEQ ID NO: 4030 - DNA, 1359 bp, Hordeum vulgare subsp. vulgare
ggggtccctgccacgacgcccttctaaaccctcccttctcccacttctccacccctctccctcaccaagaaaactcgccgccgccgccgccgccaccgcagccgcagccgcagccgcagcaggcgagcgagatggtgtttgtgaagaaccagaagaccagggcctactccaagcggttccaagtgaagttcaagagaaggagacaggggaagaccgattacagggccaggctcaggctcaccaaccaagacaagaacaagtacaacacaccaaagtaccggtttgttgtgcgatttaccaacaaagatgtcactgcccaaattgtgtacgccaccattgctggtgacatcgtgatggctgctgcctattcccatgagcttcctcgttatggtcttgaggtcggcctcaccaactatgccgcagcgtactgcactggtctgcttttggcccgccgtgtgctcaagtgccgtgatttggatcaggaatatgagggcaatgttgaggccactggggaggacttttctgttgagccgtctgatgagaggaggcctttccgggcgctcctggatgttggccttattaggaccactactggaaaccgtgtgtttggtgcccttaagggagctttggatggtggtcttgatattccgcacagtgacaagagatttgctggcttcaagaaggatgagaagcagctggatgctgagattcaccgcaaatacatctatggagggcatgttgctgactacatgaagtcactggctgatgaggaacctgagaagtaccaatctcacttcagtgagtacatcaagaagggaatcgaggctgatggcatggaagcactgtacaagaaggttcatgctgccattcgtgctgatcctacaatagcaaaatcaaccaaggaaccaccaaagacgcacaagaagtacaatcccaagaagctgacctacgagcagaggaaggccagtctcgtagagcggctcaatgccctcaactcatctggtggtgctgatgtcgatgaagacgacgatgaatgagagtaatcgaccctaggcccctatagtgctgtcttcatgcttccaaatgaacttgctctatggcattaaagagtagtatatcgtgagaggcatttttgctcaagtttttagcactccgcatgttgtacctgcccccttggttttgagtaccgttctggagttctggattatcttaaattgtactaggtgctggcattttgacattgcttcagggtttgttgatctggatttctgttggttgtgtccgcccctgtggactggctggatatcaaggccctgtttgccgtgcatgtgatgttctgccaaatgtgttaatttattc

SEQ ID NO: 4031 - DNA, 1219 bp, Oryza sativa Japonica Group
aactattccttctcccacctctcccctctcctcgctcctccacgcgccgccgccgccgcagcggagcagccacagcaggcgagcgacatgggagggtttgtcaagacccagaagaccaatgcctaccacaagcgtttccaagtcaagttcaagagacggaggcagggcaagactgactacagggccaggattaggctcaccaaccaagataagaacaagtacaacacaccgaagtaccgcttcgttgtgagatttacaaacaaagatatcacagctcaaattgtctatgctaccattgctggtgatatcgtgatggctgctgcctactcccatgagctgcctcgctatggtcttgaagttggtctcaccaactatgcggcagcttattgcactggcttgcttttggctcgccgtgtgctcaagctccgtggtttggaccaggagtacgagggcaatattgaggccactggggaggactactatgttgaaccagctgatgaaaggcggcctttccgtgctctcttggatgttggcctcattaggacaaccactggaaaccgtgtctttggtgccctcaagggagctttggatggtggtcttgacattcctcacagtgacaagaggtttgctgggttcaagaaggacgagaagcagcttgattctgatattcaccgcaagtacatctacggtgggcacgtggctgactacatgaggtctatggcggaggaggaacctgagaaattccaagcccacttcagtgagtacctcaagaagggaattgatgctgatggcatggaagcactgtacaagaaggtccatgctgccatccgtgctgatcctaccatggccaaatcaaccaagaaggaaccggcgacccacaagagatacaacctcaagaagctaacctacgaacagaggaaggccagtcttgtcgaaagattgaatgctctcaactcctctgctggtgctgatgatgatgacgaggaagaggatgatgagtgaaagagtttagccttatcacagtagttccatctttatgctgccaaacaaactccatatggcatttaagttcacctgtatagtcttgcaagttgcaacaggcatttttgtttatgttctgaactccgctcaaagaacctatttctttcggtttttggttctcaacctggagctatcggttatcttatttatgtgagaagctgccgtttggatattgatc

SEQ ID NO: 4032 - DNA, 1586 bp, Zea mays
gacggtagggcgggccggcggggcggggcccctgtaaagcacgagccttgttagcaaaattatatataaataaaccccactccatcgattcctctgccgtttttagcaccgaatcatcgcagacgcacaccacgccgcagcactcagcactccggttcgggcgttcgggcaggcgaattagggatacgttggaggagcaatggcgggaaggcgagaggagtggggtggagaggtactgcagcggcaacgggaggaggaggaggaggaggatgaggaagagcaagaggatgaggatttcatcgacatggacctgagctctgccgcggccaggacgcccgtggcgcatgagttcgagttcatgtcggcgccgctggaccggtggggcgagaccctggctgcgtcgccggcagacgagctcttctacaaggggaagctgctgccgctgcacctgccgccgcgcatccagatggtggaggagctcctggacggccggggccggggccgcggcagggacagggacagggacagggagctcctgttccgcggcgtcagcagcacggccccggcgacgccgtacgagtcgtgcaacgcgtcgccggccaactcgtcgtgctacggctacggctacgccagcggggagctcaacgtcgaggagtacttccaggagtacgcggccggcctggcgctggcggaggacgccgccgcggcgccgaggaagccgtggtccaggaggctacggttcatgaggcagctcaacctgggcctccggctcagggcgtccaaggcgtacctcaagaccatcttgttcgcggccaggccggggagcccggccgacgagaagagcggtcttggcgccgtcgccgcgaggggcgcgcgggaggagatcgccgcccatggccacggccacctcagggcgtggacaaagaacccgttcgcccagaccagaatgaacaccaggtgcgtcgcctctcacggtggcaccagccgcgccgctgccgctgccgctggagggcggtgcaaggaacgcgagcacggggcgcacaggcgctccttctccagcgtcatcgtccgctactctccgtcgaacaagacgtcccccgtccccgcgctgccgccgtcctcgtgctcctcctcatcggcctcctcgtcggtccggacctcgagcgggtcgtccgacggcggcgtggggccgacgctgaggaggagcagcagcgcgagctcggaggtggagaaccccgtccaggggctcatcgcctactgcaagaggtcccagcagctggcctccgtccggaagagcgccagcgacgccggcttccgcttcctgtcgtcgtccgcgtccaggatcgccgccgagtccgagtccgagtccgacggcctcgacgagctcaccgagatctgcagaggatgacgatacgatagtgctccatgaacgatgaatcccgatcattgtacaatgatgcaaatgcgttctggagattttgtgaaggaaaaaaaaactgaaatttgtggcgttgaccgcgcgccctttgtcaagtgtcatgatgatatcgttcaaatgaatggcatctgaactttgagccttgact

SEQ ID NO: 4033 - DNA, 1471 bp, Sorghum bicolor
gtttcagcaccgaaaaatcatcctacacagacagacagacgcagcgcgccggcacgccacaaccaaagaacacgcggcaatggcgggaaggcgagaggagggggatggaggagaggtgcagcggcaggtggaagaagaggaggaggaggattacatcgacatggacctgagcagctctgccggggcgcgggagttcgagttcatgtcggcgccgctggaccggtggggggagccactggcgtcgccggcggacgagctcttctacaaggggaagctgctgccgctgcacctgccgccgcgcatccagatggtggaggagctcctggacggccgcgggggatgtagcagaggcggcagcagggagcttctccaccacctccacggcatcagcatcagcaccgccccggcgactccgtacgagtcgtgcaacgcgtcgccggccaactcgtgctacgtcagcggggagctcaacgtcgaggagtacttccaggagtacgcggccggcctggcgctggcagacgacgacgccgcggcggcgaccggcggggagaggaagccgtggtccaggaagctcaggttcatgaggcagctcaacctcgggctcaggctcaaggcgtccaaggcgtacctcaagaccatcttcgcagccaataagccggggaacccggacgatcttggcgcggcgaggggagcaagggaggagctcgcccatgggcaacccagggcgtggaggaagaagaacccgttcgcccagatcagaagcaacaggtgcatcgcctcccacaccggcggcgtcggcgtcgtcggcggcagcagccgtgccgccgcacccgcaggaggccggtacaaggagcgcgagcacgggcacaggcggtccttctccagcgtcatcgtccggtactcctcgtcgaacaagacgtcctccgtccctgcgctgccgtcgtcctcgtcgtcctcgtgctcgtcgtcgtcgtcgagctcgtcagcctcctcgtcggtccggacctcgagcgagtccgacggcgcgggcccggcgctgaggaggagcagcagcgcgagctccgaggtggagaaccccatccaggggctcatcgcctactgcaagaagtcccagcagctggcctctgtcaggaagagcgccagcgacgccggcttccgcttcctgtcgtcggcggcgtccaagatcgccgccgagtcggacagccttgatgagctcaccgagatttgcaggggatgatgatatggtagtgccatgaatccctgatgattgtacaatgatgcaaatgcgttctggggattttgtgaaaaaaaaaactaaaacttgtggtgttgaccaccctgtgtcatgatgatattgttcaaatgaatgacatctgaactttgaacattgactgtttccagtacattactctatgcaatagctgtaaaattttccatggatgagtaaaatcaatagcaaagtcttgcttcc

SEQ ID NO: 4034 - DNA, 1831 bp, Sorghum bicolor
gccgctgcgttccgtgcctgtactcgcgggttctcctcggccctgccccccaatcgctgcgcctgggcgccgctttcgccgccggatctgggcgccggacggtacccctgacgaatcgatggcgcgagctgcgctccgattgggcgcccgctcccgcgcgctcgcgctcctcgtcctcgtgtcagtggctctgcttccacctgtcagttccgacgatgggtacaaacactgcgagggtgtcgtcagaggctgggcggattcctccactgggcgcgagaaggacggggacaaactgagcctcaaggatttgctcttcttcctccacattcctaggactggaggccgcacctactttcactgcttcctcaaaaagctctatacaaatgcgcaggaatgcccgcgttcttatgacaaactacggttcgacccaagccatcctgattgcaagcttgttgttagtcatgatgactacagcttgacgtccaagctgccaagggagagaacttctgttgtaacaatactaaggaacccagttgatcgtgtatttagcacatatgagttctcagttgaagttgcagctagattccttgtgcacccaaacttaacttctgcaaagttaatgactacccgtgtgttaacaaagtctcgtgctgtcagtactttggacatctggccttggaagtacttggttccatggatgagggaagatctgtttgccaggagagatgccaggggtggtgacaaagttcatagtagtaagaaggttaatgcatatgatgtggaggatatggttatgccattacatcagtacatcaatgatccagttgcccatgaaatcattcataatggggctacctttcagattactgggttaacgaacaattcatactttgatggagcacctgaggttcggcattgtgtcagaaagcatccagatcttggtcgtattgtgcttgaagttgctaagaataggctggaccagatgctatatgtaggacttacggaggaccatgaagaatcagcgaggttgtttgctcatatggtaggagcacaggtgctttcacaatctgggacattgaatttagatctcaaggaagatgtgcccagtgagactgactctcactcatccatggtggagcccgaggatgaagaaacaaatgatcatctgaatagcacgcatggttggcaaaataatgaagccctgaactctaccaacgacgaacatggaaaaggaaatatgactgttggtaaactgatggaagcttatgaaacttgcatcgccaaactgcggaagtctcaatctggccgccgtaaaatatccctaaagaaagttcaggaagcaaacttttcaaaagaggcacggaagctggtaccagaggcaattttgaaacaaattatctcattgaacagccttgacatggaactttatgatcatgctaagaaaatttttacccaggaacatctgatgctaaaagctcagcaatccatggtggggcagcacagacagttggcagaacaaaaggagggctggatcagcataatcttcagcgatgagatttgctccccttggatggtggtcttgcttggtatagggatcaccatgatcatagttttggtctcatttgctgtaacgacgagaaaaagaacgtctaagcttaaggtttaaccagaattcatttaggctagattttgatgtacagtctgatgatgcccccaaacattacgcttagcattctttggggcagagctgttagtgcacagaatcatgtatattcgtgcggtcgtactgggtgccagacaatttgagatgccgcgttggtagtgtgttcac

SEQ ID NO: 4035 - DNA, 1898 bp, Zea mays
ggccagtgggggctctgaggccgagggaggcgaggaaagcggcgggtgccgggccgcccgcgccggtgccgagccgcccgcgccggtgccgaggccctcaccagtcaccaccccctcccctcttccgtctgtcccccgcttgccgccaccgccgctgcccgctcgcgatccttcccctttttaacgctcccgcggccccgcgtcgtgctcccttttgtcgccgctgccttcgtgcccgtactcgcgggttctcctcgctcctcaatctccgcgcctgggcgcggcgttcgccgccggatctgggcgcgggacggtgccccggacggtcgatggcgcgggcggcgctccggttgggcgaccgcgcgctcgcgctcctcgtcctcgtgtcagtggctctgcttccacttgtcagttccgacgatggacacaaacactgcgagggtgttgtcaggggctgggcggattcctccacggggcgcgtgaaggacggggacaaactgagcctcaaggatttgctcttcttcctccacattcctaggactggaggccgcacctactttcactgcttcctaaaaaagctgtatacaaatgcgcaggaatgcccgcgttcttatgacaaactacggttcgacccaagccatcctgattgcaagctggttgttagtcatgatgactatagcttaacttccaagctgccaagggagagaacatctgttgtaacaatactaaggaacccagttgaccgtgtatttagcacatatgagttttcagttgaagttgcagctagattccttgttcacccaaacttaacttctgcaaagttaatgactacccgtgtgttaaaaaagtctcgtgctgtcagtactttggacatctcgccttggaagtacttggttccttggatgagagaagatctgttttccaggagagatgccaggggtatcgacaaagttcatagtagtaagaaggttaatgcatatgatgtggaggatatggttatgccgttacatcagtacatcaatgatccagttgcccatgagatcattcataatggggctacctttcagattactgggttaacgaacaattcatactttgatggagcacatgaggttcgacattgtgccagaaagcatccagatcttggtcgtattgtgcttgaagttgctaagaataggctggaccagatgctgtatgtaggacttacagaggatcatgaagagtcagcgaggttgtttgctcatatggtaggagcacaggtgcttttacaatctgggacattgagtttggatctcaaggaagatctgcacagtgagactgactcacacccatccatggtggagcccggggatgaagaagcaagcgaacatctgaataacacacatggttggcaaaataatgaagccctgaactctaccagcgacgaacaaggaaaaggaaatatgactgtgggtaaactgatggaagcttatgaaacttgcatcgctaaactgcggaagtcccaatctagccgtcgtaaaatatcactaaagaaagtggaggaagcaaacttctcaaaagaggcacggaagctggtccccgaggcaattttgaaacaaattatctcgctgaacagccttgacatggaactttatgaccatgctaagaaaatctttacccaggaacatctgatgctgaaagctcagcaatccatggcggggcagcacagacagttggcggaacaagaggagggctggatcggcacgatgtgcagcgacgggacttgctctccctgggtggtggtcttgctgggtctagggatcaccacgatcctagttttggccacattagctgtaacgacgagaaaaagaacgtctaaacttaaggtttaaccagaacttttcatgagacaggtctct

SEQ ID NO: 4036 - DNA, 1691 bp, Zea mays
gtgttcgtgtctctcctcgctccccgatcgctgcccctgggcgccgcgttcgccgccggatctgggcgcgcgacggtgccccagacgaaccgatggcgcgggcggcgcttcgattgggcgtgcgcgcgctcgcgctcctcgtcctcgtgtcagtggctctgcttccacttgtcagttccgacgatgggtacagacactgcgagggtgtcgtcaggggctgggcggatgcctcgtctgggcgcgtgaaggacggggacaaactgagcctcaaggatttgctcttcttcctccacattcctaggactggaggccgcacctactttcactgcttcctcaaaaagctgtatacgaacgcgcaggaatgcccgcgttcttacgacaaactacggttcgatccaagccatcctgattgcaagctggttgttagtcatgatgactatagcttaacttccaagctgccaagggagagaacttctgttgtaacgatactaagaaacccagttgatcgtgtatttagcacatatgagttctcagttgaagttgcagctagattccttgtgcatccaaacttaacttctgcaaagttaatgactacccgtgtgttaacaaagtctcgtgctgtcagtactttggacatctggccttggaagtacttggttccatggatgagggaagatctgtttgcaaggagagatgccaggggtgtttacaaagttcatagtagtaagaaggttaatgcatatgatgtggacgatatggttatgccattacatcggtacatcaatgatccagttgcccatgaaatcattcataatggggctacctttcagattactgggttaactaacaactcatattttgatggagcacatgaggttcgacattgtgtcaggaagcatccagatcttggtcgtattgtgcttgaagttgctaagaataggctggaccagatgctatatgtaggacttacggaggatcatgaagaatcagcgaggttgtttgctcatatggtaggagcacaggtgctttcacaatctgggacattgactttagatctcaaggaagatctgcccattgagactgattctcacccatccatggagcctgaggacgaagaaacaaacggacatctgaatagcacacatggttggcagaataatgaagcgatgaactctaccaacgacgaacatggaaaaggaaatatgactgttggtaaactgatggaagcttatgaaacttgcattgccaaactgtggaaatctcaatctggccgacgtaaaatatccctaaagaaagttcaggaagcgaacttttcaaaagaggcacggaagctggtatctgaggcaattctgaaccaaatcatctcattgaacagacttgatatggaactttatgaccatgctaagaaaatttttactcaggaacatctgatgctaaaagctcagcaatccatggtggggcagcacagacagtttggagaacaaaagggttggatcggcgcaatgtgcggcgacgggatttgccctccttggatggtggtcttggttgttctagggatctccacgatcatagttttggtcacattagctgtaacgacgagaaaaagaacgtctaaacttaaggtttaaccggaattcatgaggcagtctatagattttgatgtatagcctgggacaaaaaaaaaaaaaaaa

SEQ ID NO: 4037 - DNA, 2011 bp, Zea mays
attagaatagccaggggcctcgctcctctccaccacgtactccactccatccatccatcatcgtctatccatgaagagcttgcaggaggagagggcggcgttggtgccgtcgccgtggccccagcaacagagaaaggacggcggcgagcatgatccggagcagctgatggatgaggatgacggtgacgatgaggaggatctgcaggatgagcagcacacaagaacaattaggacgtcgaccaagacggcggaagcatcgtcatcagcrgagmrgcgggtgccggcgtggtggaggcggcggcgggcgcagaagctggtgcccaccagaggtgttggcctggtcatcgccggtctcctcgtgctggtcttgctcgtcgtcgtcggcggcggcggcaacaccagtcgtcgtcgctggatccacctcgactatgcatcgtcgtttctgctaggcagcggcggcggcggcggcttgaagcagcatcaatggcctcctcaccacgtcccttcacccgcagcggacctcgtgcccatacccttcagctgcggcggcaacggctcggcatgtccccgtcgtcaaaccgcaacatcacccccctctccgtcgccgtcatcgtcatcgccaccagcagccaccaagtcatcatcgtccaagaataaacaaccccctcctcagtgcccggattacttccgcttcatccactccgacctgtcgccgtggcgcgagacggggatcacgcgcgaggcggtggagcgggggcgccaccgggcggcgttccggctggtggtcgtggacggccgcgcgtacgtggagacgtaccaccgcgtgttccagacgcgtgacaccttcacgcagtggggcatcgcgcagctgctggcgcgctaccccggacgcgtcccggacctggacctcatgttcaactgcgaggacatgcccgaggtcaaggtcaagccgtcggaggagtcgtccgcgccgccgctgttccgctactgcaaggacgactccacggtggacatcgtgttcccggactggtccttctggggctggcccgaggtcaacatccgtccctgggcgccgctgctggaggagatggccgccgagatgggtcgcctgccgtgggcggaccgggagccgtacgcgtactggaagggcaaccccaccgtgtccgccgagcgcgccgacctccgccgctgcaacgactcctcgtcgtccggcggcacgcgcgtgttctggcaggactggggcgccgccatccgggacggcttccgggactccaacctggccaagcagtgccgctaccgctacaagatctacgtgcgtggccggtcctggtcggtcagcctcaagtacatcctcgcctgcgactcgccggtgctgctcatcgccacgcccttcaaggacttcttctcccggggcctcgtcgccggcaggcactactggcccatcgaccccggagcccgcaagtgcgccgacatcaacttcgccgtccacgactggggcaacgcgcacccggagcaggcgcgccggatggcggaggaaggcagcggcttcgcgcgccaccagctcagcatggactacgtctacgactacatgctgcacctgctcacccagtacgccggcctgctccgctacaagcccaccgtgccggagaacgccgtagagctgtgcgccgagaccgtcgcctgccccgctgcgcaccacagcaacaggagggagttcgacttcatgatgcagtccagggagaggtacatcgccgactaccagccctgcacgctgccgccgccctttaccgaccgtcacatcagggagatgacgcgaagagaccaggaggtgcgcgccaacgtgcacaagatgatgaccaccgtcactccatgacgtcaccaattaagggattctcttgttctctatctatctatctatcttgaatatccacttcgttatactacgtcctggtctctgtctctataatattaaaatatcagttttaatggtcttataaaaaaaaaaaaaaaa

SEQ ID NO: 4038 - DNA, 2182 bp, Sorghum bicolor
actctcaaatttctctggattcacagcataatcgtagtgggagtacgtagtaaagatgtggcgtctgcctgctgccatgttgacgagcgagcaaaggaagttaaggaggcgcgcgcgagcagtttcttcttctattctttcttgactagatatatactatgttatgtgtatatataaatatagatagatctgcgtgcgctggttaattaattagtggagtcgtttagtgcagtgctctgctttcatcttctcccccggtgtggccgggttgcaattgtctccgtgccgccctccatcatccatcatccatgcatataaattattcagttccaacctactagcttggttacttgaagcaaagcaagcaacctagctctaccatccatccaatccatccatgaagaagagcttggaggagcagcgcgacgaggaggagggggcggcgttggtgccgcaacatgaacatcgtcagacgatatcttcgccttcgccgcctcatcaggatccagagcagagcggtgacgacgacgacgacgatgctcatcatcatcatctggtggcggcgccggcgtggtggaggcggcgggcgcagaagctggtgcccaccagaggcgtgggcctggtcatggccggtctcctggtgcttgccttgctcgtcggcagcggcagcaccagccgctggatccacctcgacggctatgcatcgttgcagtcgtttctgctcggcagcggcggcggcatgaaacagcaccggtggcttcctcaccacgtcccctcgcctgaagcggacctcgtgcccatacccttcagctgcggcaacggcactgggtcgccggggacatgccgccgccgccgtgacacgacgacgacgacagtacaatcatccccctctccgtcgccgtcgtcaatgccaccagtggcgtcgtcgtccaaagttaaatcagcatcgaagaaattagccccacctcctcctcctgagtgcccggagtacttccggtacatccactcggacctgtcgccgtggcgcgagacggggatcacgcgggaggccgtggagcgggggcgtcaccgggcggcgttccggctggtggtggtggacggccgcgcgtacgtggagacgtaccaccgcgtgttccagacgcgtgacaccttcacgcagtggggcatcgcgcagctgctggcgcgctaccccggccgcgtcccggacctggacctcatgttcaactgcgaggacatgcccgaggtgcgcgccgccgacttcgccgccgcgccgtcgcaggcgccgccgctgttccgctactgcaaggacgactcgacgctggacatcgtgttcccggactggtccttctgggggtggcccgaggtgaacatccgtccctgggcgccgctgctggaggagatggcggcagagacggcgcgcctgccgtgggcggagcgggagccgtacgcgtactggaagggcaaccccggcgtgtccggcgagcgcggcgacctgctccggtgcaacgactcgtcgggggagtggaggacgcgcgtgttctggcaggactggggcgccgccatccgagacggcttccggaactccaacctggcgaagcagtgccggtaccggtacaagatcttcgtgcgggggcggtcgtggtcggtgagccagaagtacatcctcgcctgcgactcgccggtgctgctcgtcgccacccccttcaaggacttcttctcccggggcctcgtcgccggtaagcactactggccaatcgaccccggcgccggcaagtgcgccggcatcaagttcgccgtggactggggcaacgcgcacccggagcaggcgcgccggatggccgaggaaggcagcggattcgcgcgccacgacctcagcatggactacgtctacgactacatgctgcacctgctcacccagtacgccgccctgctccgctacaagcccaccgtgccggagaacgccgtcgagctgtgcgccgagaccgtcgcctgccccgccgccaagaacaacaacaacagggaattcgacttcatgatggagtccagggagaggttcgtcgccgactaccagccctgcacgctgccgccgcccttcaccgacgatgacatcagggagatggcgcgaagagaccaggaggtgcgcgccaacgtgcacaagttgatgaccaccatgactccatga

SEQ ID NO: 4039 - DNA, 1694 bp, Zea mays; identical to SEQ ID NO: 1566

SEQ ID NO: 4040 - DNA, 2035 bp, Sorghum bicolor
agcagcatttgcatcgcggcgtgtcgtgtcgtgtcgtctgcactaggcaagtatccgccgccgccgccgcccctacccggagcctccgtcgatttgttggattcgcaggcggcggccgcaccgcaccgcacccaccagcagccaatcaaaagcaatcagccagtcgcccagcccaacaacagacgccccagcccccaacccggattgccccgatgcgaggcacaatgccggccaccgattcctcgtcgccggcggccgcgccgctgtcctccatcggccgctccatcgcctggtcgctccgccgggatcagaaccagatccactccttcccgccgccgccgcccgacgacgccaccgacgccttccagcgccgcgccgcccatctcctcaacaacctcctcgcgccccctgctgccgacgacgtcctctccctcgcctggacgcgccgcctcgtcgacgccttcctcctctgcctcgaggagttccgagccctgctcttcggctccggggacgcgcccgcagcgcggcccccgctcgaccgcctcgtcgccgacttcttcgaccgcgccgtcaaggcgctcgacctctgcaacgccgtccgcgacggactcgacctcgtccgccagtggcgaaagcacctcgccatcgccgcagccgtcctctcctcctcctcctcgccgccgccgctcggggaggcccagatccgccgcgcccgcaaggcgctcaccgacctcaccatcctcatgctcgacgacagggacggcgggggcgtcgttggccagcgcaaccgctccttcggccgacctgccaacgccaccaacgaaaaagccgcccgcggccacggccagggccaccaccgccggagcagcagcggcgggagctccggctctggctcgggctcccacctcaggtccctctcctggagcgtgtcgcgggcctggtccgccgcgcgccagctgcaggcgatcgggggaggcctgcccgtgccccgcccacaggacaacgccgccacgggaggcctcgcctcggcagtctacaccatgggcgccgtgctcttcatcgtcgcctttgccctcgtcgccgccatcccgtgccaggaccgcggcctccacgtgcatttctccgtgcccaggaacctcgcctgctcgggccccatcaccacgctctacgagcgcatcctcgacgagtccaagaagaaggagcgcaagaactcgtgcggcctgctcaaggagatccaccagattgagctctcctccaggcacctcatggagatcactgacgccgccgagttcccgttgcacgaggacaaggatgtccaggtgcgggaggccgcgcaggacctagtgcacctgtgcgacaccatcaaggaagggctcgacccgctcgagcgcgaggtcaggcagatgttccaccggattgtgcgcacacgcacagaaatccttgattgcttgagtaagccacatggcacccagtgatgagaatacgcagggaaacagggaacccacactgcttgcttgcttgctgtgatgccacttaaggaaacatccttgtgtgaaatgcagcaggcaggggtcagcccgatttagatgaggtagcttttctctgcataagttagcaactgctacatcatacatgtgtcttcatagaggcttgtccttctgtttgataaattggtttcttctttcttttttttttcatttcattttctcgtctttgtagattgtgaatccttccttacttggcagtgcttcgtagtaatggtctaatactatttattccattcttttcatctggtttgatgtggtgatgccagtcactttgctgattagtaatcagtgattagttaatgttcatatggttagggtctttgccagcacagaaacaaaacagaggtttatggtgctatgctatgctggaagtgttgagagattgtgaggtgatgctattgacatcaccaccaattttttgtgtccaaagattagtgaatgtatatagtctgatcacaaaggagatgtcacttcatcattgatcactc

SEQ ID NO: 4041 - DNA, 1277 bp, Oryza sativa
atgccggccaccgattcctcgtcggcggccgcgccgctcacctccttcggccgctccttcctctcccaccgccgcgaccagatccctcctcccccacccgaccaccactcccactcccacacccaacacccctcttcctccgacctcgagatcgacgccttccaccgccacgccgccgacctcctccacgacctcctctccgactccaactccgacccctccgccccggacctcctctccctcgcttggacgcgccgcctcctcgactccttcctcatctgcctcgaggagttccgcgctatcctcttcgccctcgccgactcccagcccctctcccgccccccgctcgaccgcctcctcctcgacttcctcgaccgcgccgtcaaggccctcgatctctgcaacgccctccgcgacggcctcgacctcatccgccagtggcgcaagcacctcgccatcgccgccgccgctctcgcccccgcccccgccgcgcagcgaggagaggcccagatccgccgcgcccgcaaggccctcaccgatctcaccatcctcatgctcgacgacaaggacgctgggggagtcgtcggacagcgcaaccgctccttcggccgcgccggtactactcgggactcccttccccacggccacggccaccaccgccggagcagcagcggcgggagctccgggtccggctctggctcccatctcaggtcactctcctggagcgtctcccgcacatggtccgccgcgcgccagctgcaggccatcgggggaggcctcacggtgccccgcgcgaacgacatcgccgccaccggaggcctcgcctccgccgtctacgccatgggcgccgtgctgttcgtcgtcacctgggcgctcgtggcagcaatcccatgccaggaccgcggcctccaggcgcacctcacagcggtgcccaggaccttcccctgggctggccccctcatcacactcttcgaccgcatcctcgacgagtccaagaagaaggaccgcaagcactcatgcggcctgctcaaggagatccaccagattgagcgctgctcgcggcagctcatggaggtcactgatgctgcggagttccccttggccgacgacaaggattccgaggtgcaggaggccacgcaggagctggtgcaagtttgcgggtcactcaaggatgggctggaccctcttgagcgccaggtgcgggagatgttccacagggttgtgcgcacccggacagaaatcctcgactacctcagtaggccgcacaacgccgggtg

SEQ ID NO: 4042 - DNA, 1553 bp, Sorghum bicolor
acccccatccatatatagcgcacggcgcacgcgacgcggcggccatttttcctaagctggaggagctctcctcatttgcgcatcaccacctcaaataaggcaacgcaataataatcagcgattcaccatcctctcccggtccggcccccggctccggccgaataacaaacaattccggccctcgcgcctgaccacccccgcgcgcgcgcggcgatcgaattcgaccgccggccggccggagagcagtggtgtgtggtatatatacgcacatacacatacatacatacatatatgggccgcctgacgccgccgccgtcggaggcggcggcggtggcgccgctgctcctcgtcgtcgtccacgtcctcctcctggcggccgccgtttccgcgctcccggcgatcaacgtgacgacgatggcgttcgaggacgggtacgctccgctgttcggccacggcaacatcctccgctccgccgaccaccgcaccgtcagcctcctcctcgaccgctccaccgggtctggtttcatctcctcgtccatgtaccagcacggcttcttcagcgcctccatcaagctcccctccgactacaccgccggcgtcgtcgtcgccttctacgcgtcgaacggcgacgtgttcgagaagcggcacgacgagctggacttcgagttcctcggcaacatccgggggaagccatggcgggtgcagacgaacgtgtacggcaacggcagcgtggggcggggccgcgaggagcggtacgtgctgccgttcgacccgaccacggagttccaccgctactccatcctgtggacgcccgccgccgtggcgttctacgtcgacgacgtgccggtgcgagaggtccgccggtccgacgccatgggcggggacttcccgtccaagcccatgtccgtctacgccaccgtctgggacgcctccacctgggccacctccggcggccgctaccgcgtcaactacaggtacgggcccttcgtcgcgtccttcaccgacctcgccctcctcggctgccgcgtcgacgggcccgtcgccgccatccagcaggtgctgctgccgccggtgccaagccggtgcgccgccgacgaggagaagctcagggcgtcggacgtggccgtcatgaccgtggagaagcagcaggccatgcgcaggttccgggagcggaacatggtctactcctactgctacgacacgctgcggtaccccgccgcgttcccagagtgcgacgtcgtcgagtcggagcgccgccggttcaaggatagtggacacctccgcttcgcgttccggcggcggatgggcccgcgacgctccggcggaagggcggccagcagagccgccgccgccgccgccagcagggacagggacagggacctcaagaagcgcgcggcggacatgtagcattcgtgtagtagtggccggtgatggtaatggtgatgttgacggatattagcgtgtgccagtgccactattaatcaattaattggaaacgatacaatcacaggagtggtggaatagcgagcaaaaaaaaaatctattttttacct

SEQ ID NO: 4043 - DNA, 1217 bp, Zea mays
ccgcctggcgtcagcatcattaccatcgccgcgcccgcctgctggctcgccggcgatcgaatttgaccgccggtcggcgagcggagcatacgtgcatacatggtttgcttgacgccggcggcggcggcgccgctgctgctcgtcgtcgtcctagcggcggccgtgtccgcgctcccggcgatcaacgtgacgacgatggcgttcgaggacgggtacgcgccgctgttcgggcacggcaacatcctccgctccgccgaccaccgcaccgtcagcctcctcctcgaccgttccaccgggtccggtttcatctcgtcgtccatgtaccagcacggcttcttcagcgcgtccatcaagctcccctccgactacaccgccggcgtcgtcgtcgccttctacgcgtccaacggcgacgtgttcgagaagcggcacgacgagctggacttcgagttcctgggcaacatccggggcaagccatggcgggtgcagaccaacgtgtacggaaacggcagcgtgggccggggccgggaggagcggtacgtgctccccttcgacccaaccacggagttccaccgctactccatcctgtggacgcccgccgccgtggccttctacgtggacgacgtgccggtgcgcgaggtgcggcagtcggccgccatgggcggggacttcccctccaagcccatgtccgtgtacgccaccgtgtgggacgcctccacctgggccaccgccgggggccggtaccgcgtcaactaccgctacgggcccttcgtcgcctccttcaccgacctggccctcctcggctgccgcgtcgacgggcccatccagcagacgacggcggagcggtgcgccgcagccgccgaggcactcagggcgtcggacgtggccgtcatgacggtggagaagcagcaggccatgcgcaggttccgggagcgcaacatggtctactcctactgctacgacacgctgcgctaccccgccgcgttccccgaatgcgacgtcgtcgagtcggagcgcaggcggttcaaggacaccggacacctccgcttcgcgctgcggcggcggatgagcccgcgacgctcccacggcagggcggccagcagggacagggtcagggagctcaagaagcgcgcggcggacatgtagcattcgtgtagactgtagtagcggtcggcgatggtaatggatattcacgcctgccgctgttaatctattggata

SEQ ID NO: 4044 - DNA, 1647 bp, Sorghum bicolor
ccgccgcgcacacctcggtagcttgccgaagcgtccacctgtgtgtgtacggtcaggcggcagagctagcgctttcactactcagtggccgttgccattgctagctagctttcactagcgtttttagctgcaatgccggcggcggcgcagagtgtcagggcaatggcggcggccgcagccgttgtggcaatgctgctctcgaccgcggcggtggcggccgcgcagcacgactacggcgacgctctgcacaagtgcatcctcttcttcgaggggcagcgctcggggaggctcccgcctgaccagcgcctccgctggcgccgcgactccggcctccacgacggcgccgcggccggggtggacctgaccggcgggtactacgacgccggcgacaacgtgaagttcgggttcccgatggcgttcacggcgacgctcatgtcgtggggcctgatcgacttcgggcgcagcttcggcgcgcacagggaggaggcccggaaggcggtgcggtgggcgacggactacctgatgaaggcgacggcgaggcccaacacggtgtacgtgcaggtgggcgacgccttccgcgaccacgcgtgctgggagcggcccgaggacatggacaccccgcgcaccgtgtacaaggtggacccgtcccacccgggctccgacgtcgccgccgagaccgccgccgcgctcgccgccggctccatcgtcttccgcgacgccgacccggcctactccaagcgcctcctcgaccgcgccgtcgccgtgttcgagttcgcggacaagtaccggggcccctacagcagcagcctccacgcggcggtgtgcccctgctactgcgactactccgggtaccaggacgagctgctgtggggcgcggcgtggctgcacaaggcgtcgcggcggcgggagtaccgcgagtacatcaagaggaacgaggtggtgctcggcgcaagcgacgccatcaacgagttcggctgggacaacaagcacgccggcatcaacgtcctcatctcaaaggaggttctaatggggaaggacgagtacttccagtcgttccgtgtcaacgccgacaacttcatgtgcaccctcctccccggcatctccaatcacccccagatccagtactccccaggcgggctgctgttcaaggtcgggagcagcaacatgcagcacgtgacgcagctgtcgttcctgctgctggcctactccaactacctgagccacgccggcgggcgcgtctcgtgcgggtcgtcgtcggcgtcgccggtgcagctccggcgcgtggccaagcggcaggtggactacatcctgggcgacaacccgctgcggatgtcgtacatggtcgggtacggcgcccggttcccgcggcggatccaccaccgcgccagctcgctgccgtccgtggcggcgcacccggcgcggatcggctgcaaggccggcgccgcctactacgccagcccggcgcccaacccgaacctgctcgtgggcgccgtcgtcggcgggcccagcgacgcctccgacgccttccccgacgcgcgcgccgtgttccagcagtccgagcccaccacgtacatcaacgcgccgctcatgggcctcctcgcctacttctcggcccaccccaacccggccgagtccggcggcgactag

SEQ ID NO: 4045 - DNA, 2013 bp, Oryza sativa Japonica Group
aactaaaccaccaccaccaccaccccccgccgagacagtgacactctccttccgcggcaatggcggcggcgggcggtgctgtgctgctgctggtgctggcgaccgcgacttcggtgacagggcagcatgactacagcgacgcgctccacaagagcatcctgttcttcgagggccagcgctccggccgcctgccacccgaccagcgcctccgctggcgccgtgactccgccctcaacgacggcgccaccgccggcgtggacctgacgggagggtactacgacgccggcgacaacgtgaagttcgggttcccgatggcgttcacggcgacgctcatgtcgtgggggctgatcgacttcgggcggagcttcggggcgcacgcggcggaggcgagggaggcggtgcggtgggcgacggactacctgatgaaggcgacggcgacgcccaacacggtgtacgtccaggtcggcgacgccttccgcgaccactcctgctgggagcgccccgaggacatggacaccccgcgcaccgtctacaaggtcgacccctcccaccccggctccgacgtcgccgccgagaccgccgccgccctcgccgccgcctccatcgtcttccgcgacgccgaccccgactactccaaccgcctcctcgaccgcgccatccaggtgttcgagttcgcggacaagtacaggggcccatacagcagcagcctgcacgcggccgtgtgcccctgctactgcgactactccggctacaaggacgagttgctgtggggcgcggcgtggctgcacaaggcgtcgcggcgccgggagtaccgcgactacatcaagcggaacgaggtggtgctcggcgccagcgaggccatcaacgagttcggctgggacaacaagcacgccggcatcaacgtcctcatctccaaggaggtcctgatggggaaggacgagtatttccagtcgttccgcgtgaacgccgacaacttcatctgcaccctcctccccggcatctctaatcatccccagatccagtactccccaggtgggctgctgttcaaggtgggcaacagcaacatgcagcacgtgacgtcgctgtcgttcctcctcctcgcatactccaactatctcagccacgccaacgtccgcgtcccctgcggcacctcctccgcctcccccgtccagctccgacgcgtcgccaagcgccaggtggactacatcctgggcgacaacccgctgcggatgtcgtacatggtgggttacgggtcgaggtacccgctgcggatccaccaccgggggagctcgctgccgtcggtggcggcgcacccggcgcagatcgggtgcaaggccggggcgacctactacgccagcgcggcgcccaacccgaacctcctggtgggcgccgtggtgggcgggcccagcaacaccagcgacgcgttccccgacgcgcgggccgtgttccagcagtccgagcccaccacgtacatcaacgccccgctcctcggcctcctcgcctacttctcggcccaccccaacctggcccagtccgatctcctctacgactgaaaatctgacggcccaacacaagtggccttccccgttttgcattggccgtagtgggccgatttgatcgagtaattggttagtaatttagtattgatcctgtagcgtgtgccgatcctttcctgtaaaaaatggcaggaacggggattggtcgtagcgtggttgtatgcactgtaccctagcattttagtagcaatttagcgtatgctggatgcgatgtcttattggcatcagatgtccatccggctatgcgatgcattctgttcggctatctactctaagcatcctttgtcaagtgtcaagggggccggaattagtgccaggattaagctttaagctaagcatatctgtaacgtcgtcgtccacaagacatgtcatgtgcagcattgggcctttttccggcttttgggattactcctcgctggaatccaaagctttgcttgaagcaggcagctattctcgt

SEQ ID NO: 4046 - DNA, 2071 bp, Oryza sativa Japonica Group
actctgtgcaacaccgtgcggtagcagagcaagagcagcaaaaaaaaaaaccaccacgcctcgttcagtcactcgcacgctcgctcgatcacccggccgccgcgaagcgtcgaccgaagtgtatcgcacatttcgaaagttcttcgcgggcaacagaaagcagtttgtggtgtgcattgccgatttgccattgcgttgggttcatttcttccatcggcaatgctggcggcgtcgttgagagtcgaggcggtggcggtggttgctgcggctgtgctggtgctgctgctctcgccggctgcggtggtggtggtggccgggcagcatgattacggcgacgcgctccataagagcatactgttctttgagggacagcgctccggcaggcttcctcccgaccagcgtctccgctggcgccgcgactccggcctccacgacggcgccgccgccagcgtggacttgaccggagggtactacgacgccggcgacaacgtgaagttcgggttcccgatggcgttcacggcgacgctgatgtcgtgggggctgatcgacttcgggcggagcttcgggccgcacaaggaggaggcgaggaaggcggtgcggtgggcgacggactacctgatgaaggcgacggcgaagcccaacaccgtgtacgtgcaggtcggcgacgccttccgcgaccactcgtgctgggagcgccccgaggacatggacacgccccgcaccgtctacaaggtcgacccctcccaccccggctccgacgtcgccgccgagaccgccgccgccctcgccgccggctccatcgtcttccgcgacgccgaccccgcctactccaagcgcctcctcgaccgcgccatcgccgtgttcgagttcgcggacaagtaccggggcccctacagcagcagcctccacgacgcggtgtgcccctgctactgcgacttctccgggtacaaggacgagctgctctggggcgcggcgtggctgcacaaggcgtcgcgccgccgcgagtaccgcgagtacatcaagaagaacgaggtggtgctcggcgccagcgagtccatcaacgagttcggctgggacaacaagcacgccggcatcaacgtcctcatctccaaggaggttctgatggggaaggacgagtacttccagtcgttccgtgtcaacgccgacaacttcatgtgcagcctcctcccgggcatctctaatcacccccagatccagtactccccaggtgggctgctgttcaaggttgggggcagcaacatgcagcacgtgacatcgctgtcgttcctgctgctcgcctactccaactacctgagccacgccggcgcgcgggtgtcgtgcggcgcgggcggctcggcgtcgccgacgcagctccgccgcgtggccaagcgccaggtggactacatcctcggcgacaacccgctgcggatgtcgtacatggtgggctacggcgccaggttcccgcggcggatccaccaccgcgggagctccctcccgtccgtcgccgcgcacccggcgcggatcgggtgcaagggcggcgccgcctactacgccagcgcggcgcccaaccccaacctgctggtgggcgccgtcgtgggcgggcccagcgacgccacggacgcgttccccgacgcgcgcgccgtgttccagcagtcggagcccaccacgtacatcaacgcgccgctcatgggcctcctcgcctacttctccgcccacccaaacccagccgagtgggccgacgactagaacaacccgccaaagtatatcagctatacgggcctgggctattgtttgttttgtcagggccgaatcgggtgattattgcctggttgattgatactacttgtgtaaccaaatatagttaacttcctctacaaaaccccaacaaagtatagttaactgcagccacctcctttcatgcgaaaaatatcggccaggaggaatgcataggctttattaggctgctactcctactagcaatgttgtaacagtactgtagacatagttacacttgtactgctatggttcagcgagtggattatatataaagtgcaccaccgacgtttcctct

SEQ ID NO: 4047 - DNA, 1900 bp, Zea mays
gtcgcgcacacctcagtctcctgccgtgcgtagtgtgtacgggcaaggcggcagagctagctttcactacactcagtggccattgccgttgctagctttcaatagctcttagctgcaatgtcggcggcggcgtcgcagagcagtgtcaaggcaatggcggcggccgcagccgctgtggcaatgctgctctcggccgcggcggcggtggccgcgcagcacgattacggcgacgccctgcacaagtgcatcctcttcttcgaggggcagcgctcggggaggctcccgccggaccagcgcctccgctggcgccgcgactccggcctccacgacggcgccgcggccggggtggatctgaccggagggtactacgacgccggcgacaacgtgaagttcgggttcccgatggcgttcacggcgacgctcatgtcgtggggcctgatcgacttcgggcgcagcttcgggccccacagggaggaggcccggaaggcggtgcggtgggcgacggactacctgatgaaggcgacggcgaagcggaacacggtgtacgtgcaggtgggcgacgcgttccgcgaccacgcgtgctgggagcggcccgaggacatggacaccccgcgcaccgtgtacaaggtggacccgtcccacccgggctccgacgtcgccgccgagaccgccgccgcgctcgccgccggctccatcgtcttccgcgacgccgaccccgcctactccaagcgcctcctcgaccgcgccgtcgccgtgttcgagttcgcggacaagtaccggggcccctacagcagcagcctccacgcggcggtgtgcccctgctactgcgactactccggataccaggacgagctgctgtggggcgcggcgtggctgcacaaggcgacgcggcggcgggagtaccgcgagtacatcaagaggaacgaggtggtgctcggcgccagcgacgccatcaacgagttcggctgggacaacaagcacgccggcatcaacgtcctcatctcaaaggaggttctgatggggaaggacgagtacttccagtccttccgtgtcaacgccgacaacttcatgtgcaccctcctccccggcatctccaatcacccccagatccagtactccccaggcgggctgctgttcaaggtcgggagcagcaacatgcagcacgtgacgcagctgtcgttcctcctgctggcctactccaactacctgagccacgccggcgggcgcgtctcgtgcggctcgtcgtcggcgtcgccggtgcagctccgccgcgtggccaagcggcaggtggactacatactgggcgacaacccgctgcggatgtcgtacatggttggggtacggcgcgcggttcccgcggcggatccaccaccgccgccagctccgctgccgtccgtggcggcgcacccggcgcggatcggctgcaaggccggcgccgcctactacaccagcccggcgcccaacccgaacctgytcgtgggcgccgtcgtgggcgggcccaccgacgactccgacgccttccccgacgcgcgcgccgtgttccagcagtcckagcccaccacgtacatcaacgcgccgctcatgggcctcctcgcctacttctcggcacatcccaacccagccgagtcgggcggcgactgaaaaaagcctagggagagtgatagatgacgaacgcacgcacgggcctgggtattttagatgggctttggtttgtcttgttcgggcccgattgttgcctggtgtatccgtacgagtagttgtaactagttaaccagagccactcccttgcctgcaaaagaaagaccagggaagaggaattagtaggctccaagattgtattagctgttaagattatatacgctagtagcaaggttaactgtaaacaaaaaaaaaaaaaaaa

SEQ ID NO: 4048 - DNA, 1915 bp, Hordeum vulgare subsp. vulgare
ggcacacacactcgctcctcgctctgtcactcagccgccgagagcaccgatccaacggtgctgcattgccattgcattagcttaatttcttccggtcagccgcagcaccggtcttgccgttggcggtcagggcggcaatggggctgtcgtctgcgcttgtgctggcgctgctgctcttgccggcggtggcgtcggccgggcatcacgactacggcgacgccctccacaagagcattctcttcttcgagggtcagcgatccggcaggcttccgcccgaccagcgcctccgctggcgccgcgactccggcctacacgacggcgccgccgccggcgtggacctgacgggagggtactacgacgccggcgacaacgtgaagttcgggttcccgatggcgttcacggcgacgctcatgtcgtgggggctgatcgacttcggccgcagcttcgggccgcacaaggaggaggcgaggaaggcggtgcggtgggcgacggactacttcatgaaggccacggccaagcccaacacggtgtacgtgcaggtgggcgacgccttcaaggaccactcctgctgggagcggcccgaggacatggacaccccgcgcaccgtctacaaggtcgacccctcccacccgggctccgacgtcgccgccgagaccgccgccgccctcgccgccggctccatcgtcttccgcgacgccgaccccgtctactcccagcgcctcctcgaccgcgccatggccgtgttcaagttcgcggacaggtaccggggcgcctacagcagcagcctgcacgcggcggtgtgcccctgctactgcgacttcgacgggtaccaggacgagctgctgtgggcggcggcgtggctgcacaaggcgtcgcggaggagggagtaccggcagtacatcaagaagaacgaggtggtgctcggcgccagcgactccatcaacgagttcggctgggacaacaagcacgccggcatcaacgtcctcatctccaaggaggtcctaatggggaaggacgagtacttccagtccttccgcgtcaacgccaacaacttcatgtgcaccctcctccccggcatctccgaccacccccagatccagtactccccaggcgggctgctgttcaaggtcgggggcagcaacatgcagcacgtgacgtcgctctccttcctcatcctggcctactccaactacctgagccacgcgggcgcgcacgtctcctgcggcggcggcgggcggacggcgccgccgacgaagctccggcaggtggccaagcggcaggtggactacatcctcggggacaacccgctgcgcatgtcctacatggtcggctacggcccgcggttcccgcgccggatccaccaccgcggcagctccatcccgtcggtggcggcgcacccggcgaggatcgggtgcaaggccggggcggcgtactatgcgaccgcggcgcccaacccgaacctgctggtgggcgccgtcgtcggcgggccgaccgacgccaccgacgctttccccgacgcgcgcgccgtattccagcagtccgagcccaccacgtacatcaacgcgcctctcatgggcctcctcgcctacttctcagcccaccccaaccccgccgagtgggccgacgactaacactcgccatctagacacagggaaataaaagatccaaaaagatctctctctgactgacttggccgtaccgcaagagtattggagtagtgcatcattagccattcatttgtttggtttaataataactgtatctaattattatttatttagttatttatctatagccatttcctctcctgcgaaaaagaaaagatcaggagggtgtatgggctgtatctgtagtgttgttatacttgtaagatgtttacgtgctcatattggcactacgtaaaatgtttatcaac

SEQ ID NO: 4049 - DNA, 1867 bp, Hordeum vulgare subsp. vulgare
gagcagcagtccagcccccgaaccgccgcgcacgcacagcgccaaccgaaaactgccgcccatcaacaccggagaagcctagctttagctagctagcgaggccattgcaatggcgtcgccggcgaggaaggcaatggtggcggccgcggcaatgctgctgctgctgctgctcctgtcgacggctgccgtcgcgcagcacaactacggcgacgccctgcacaagagcatcctcttcttcgagggccagcgctccggccgcctcccccccgaccagcgcgtccgctggcgccgcgactccgcgctcaacgacggcgccaccgccggggtggacctgacgggcgggtactacgacgcgggggacaacgtcaagttcgggttcccgatggcgttcacgacgacgctcatgtcgtgggggctgatcgacttcggcaagaacttcgggtcgcacggcggggaggcgcgggcggcggtgcggtgggcgacggactacctgatgaaggcgacggcgacgcccaacacggtgtacgtgcaggtgggggacgccttccgcgaccactcgtgctgggagcggcccgaggacatggacacccctcgcaccgtctacaaggtcgacccggcgcacccgggctccgacgtcgccgccgagaccgccgccgccctcgccgccggctccatcgtcttccgcgaggccgaccccgcctactccaagcgcctccttgaccgcgccatctccgtgttcgagttcgcggacaagtaccgtggtgcgtacagcagcagcctgtactcggccgtgtgcccgtgctactgcgactacgacggttaccaggacgagctgctgtggggcgcggcgtggctgcacaaggcgtcgcgccagcgcgtgtaccgcgactacatcaagaagaacgaggtggcgctcggcgccagcgactccatcaacgagttcggctgggataacaagcacgccggcatcaacatcctcatctccaaggaggtgctgatgggcaaggactccttcttcaagtcgttccaggtgaacgccgacaacttcatctgcaccctcctcccggggatctccaaccacccccagatcgagtactccccaggtggcctgctgttcaaggtgggcaacagcaacatgcagcacgtgacgtcgctgtcgttcctcctgctcgcctacgccaactacgccagccacgccaacgtgcgggtgccgtgcggcggctcctccgcctcgccggtcgtgctccgccgcgtcgccaagcgccaggtggactacatcctgggcgacaacccgctgcgcatgtcgtacatggtggggtacggggagcggttcccgcggcgcatccaccaccgcgggagctcgctgccgtcggtgtcggcgcacccggcgcggatcggatgcaaggccggcgcggcatactacggcagcagcgcgcccaaccccaacctgctcgtcggcgccgtggtgggcgggcccagcaacaccagcgacaacttccccgacgcgcgggccgtcttccagcagtccgagcccaccacctacatcaacgccccgctgctgggcctcctcgcctacttctccgcccaccccaacctgccccagtccgacggcaccgactgaagatatatgtggcccgctactcgctgcgggcaatgcggtggagtggccctctttagcggtcgtgggccgaggaacgcaagcctggttggtagtccttgttttgtacgggctgcgatgggctgatccgtcccgctgccttgctgcccctgtattattatttctatatatttctacgtgtaacggatgccgatcctttcctgtaaaaaatggcaggaaaaggatcggtcgtgccatgccaagacaagc

SEQ ID NO: 4050 - DNA, 1604 bp, Zea mays
ccagcgcctccgctggcgccgcgactccggcctccacgacggcgccgcggccggggtggatctgaccggagggtactacgacgccggcgacaacgtgaagttcgggttcccgatggcgttcacggcgacgctcatgtcgtggggcctgatcgacttcgggcgcagcttcggcccccacagggaggaggcccggaaggcggtgcggtgggcgacggactacctgatgaaggcgacggcgaagcggaacacggtgtacgtgcaggtgggcgacgcgttccgcgaccacgcgtgctgggagcggcccgaggacatggacaccccgcgcaccgtgtacaaggtggacccgtcccacccgggctccgacgtcgccgccgagaccgccgccgcgctcgccgccggctccatcgtcttccgcgacgccgaccccgcctactccaagcgcctcctcgaccgcgccgtcgccgtgttcgagttcgcggacaagtaccggggcccctacagcagcagcctccacgcggcggtgtgcccctgctactgcgactactccggataccaggacgagctgctgtggggcgcggcgtggctgcacaaggcgacgcggcggcgggagtaccgcgagtacatcaagaggaacgaggtggtgctcggcgccagcgacgccatcaacgagttcggctgggacaacaagcacgccggcatcaacgtcctcatctcaaaggaggttctgatggggaaggacgagtacttccagtccttccgtgtcaacgccgacaacttcatgtgcaccctcctccccggcatctccaatcacccccagatccagtactccccaggcgggctgctgttcaaggtcgggagcagcaacatgcagcacgtgacgcagctgtcgttcctcctgctggcctactccaactacctgagccacgccggcgggcgcgtctcgtgcggctcgtcgtcggcgtcgccggtgcagctccgccgcgtggccaagcggcaggtggactacatactgggcgacaacccgctgcggatgtcgtacatggtggggtacggcgcgcggttcccgcggcggatccaccaccgcgccagctcgctgccgtccgtggcggcgcacccggcgcggatcggctgcaaggccggcgccgcctactacaccagcccggcgcccaacccgaacctgctcgtgggcgccgtcgtgggcgggcccaccgacgactccgacgccttccccgacgcgcgcgccgtgttccagcagtccgagcccaccacgtacatcaacgcgccgctcatgggcctcctcgcctacttctcggcacatcccaacccagccgagtcgggcggcgactgaaaaaagcctagggagagtgatagatgacgaacgcacgcacgggcctgggtattttagatgggctttggtttgtcttgttcgggcccgattgttgcctggtgtatccgtacgagtagttgtaactagttaaccagagccactcccttgcctgcaaaagaaagaccagggaagaggaattagtaggctccaagattgtattagctgttaagattatatacgctagtagcaaggttaactgtgctacgtcgtctgcgtg

SEQ ID NO: 4051 - DNA, 1903 bp, Zea mays
gctcacatggccatttaccaccccgtggttttactgcactggatgatgtctgtgcgtcgccgtcgccgtcgcgtcgggccctattaaattcctccgcaccgcaccccggcctgtctcccaaccgccgcgcgcgcgcgcagaaccaaccaacttaaaccgccaacaccgagcccaaggcacaaacgttcccatggcgcggctggtgtcgacggcgacgaaggcaatggcggtcgtggtcctcgcggcggcgtcggcagcgctggccgcgcacgactacggtgacgccctccacaagagcatcctcttcttcgaaggccagcggtccggccggctgccaccgaaccagcgcctccggtggcggcaggactcggccatccacgacggcgccgaggcgggggtggacctgacgggcgggtactacgacgcgggcgacaacgtgaagttcgggttccctatggcgttcacggcgacgctcatgtcgtggggcctgatcgacttcggtcgcagcttcggcgcgcacgaggcggaggcccgggacgcggtgcggtgggcgacggactacctgatgaaggcgacggcgacgccgggggtggtgtacgtgcaggtcggggacgcgtcccgggaccacgcgtgctgggagcggccggaggacatggacaccccgcgcaccgtgtacagggtggacgcggcgcacccggggtcggacgtggccgccgagaccgcggcggcgctggcggccggctccatcgtgttccgcgacgccgacccgggctactcgcgccggctcctgggccgcgccgccgaggtgttcgagttcgcggaccggcaccgcggggcctacagcggcagcctgcgcgccgcggtgtgcccctgctactgcgactacgacgggtaccaggacgagctgctgtggggcgccgcctggctgcacagggcgtcgcgccgccgggagtaccgcgactacatcaagcgcaacgaggtggcgctcggcgccagcgacgccatcaacgagtttggctgggacaacaagcacgccggcatcaacgtcctcatctccaaggaggtcctcatgggcaaggacgagttcttccggtcgttccgggagaacgccgacaacttcatctgcagcctcctgccgggcatctccggccacccacagatccagtactcgccgggtggcctcctcttcaaggtgggcaacagcaacatgcagcacgtgacgtcgctctccttcctgctcctcgtctactccaactacctcagccacgccgacgcccgcgtcccgtgctcctcctcctcctccgccgctgccgcctcgcccgtccagctccgccgcgtcgccaagcgacaggtggactacatcctgggggacaacccgctgcggatgtcctacatggtggggtacggcccgcggtacccgctgcggatccaccaccgggccagctcgctgccgtcggtctcggcccacccggcgcgcatcgggtgcaaggccggggcggcctactacgccagcccggcgccgaaccccaacctgctggtgggcgccgtggtgggcgggcccagcaacagcaccgacgcgttccccgacgcgcgggccgtgttccagcagtccgagcccaccacctacatcaacgcgccgctgctcggcctgctcgcctacttctcccagcaccccgacccagcgcagcactgatgaacgggcagctagctagctagtagtaggtgttgtagtagtattcttccgttgctgctgctgctcgtgctatttgttttgcagtatttatgttttggtagcatattgtgccgatccattcctgtaaaaaaaatggcaggaacgaggattggtcctactgcttgtactcgtactatgccccaagtaagctgctgtatggtggtaagatgc

SEQ ID NO: 4052 - DNA, 2391 bp, Sorghum bicolor
atggggcggtcgtacattgacggcggcagggacgccgggacgacggacctcggctaccctctggtggccgtgtgcatcgacaaggacaagaacagccagaacgcgctcaagtgggccatcgactcgctggtccagaaggggcagaccatcgtcctcgtccacgtcaacaccaagggcacctccggcggcgtcgaggacgccgccgggttcaagcagccgacggacccgcacatgaaggacctcttcctcccgttccgatgcttctgcacccgcaaagacatctactgcaaggacgtggtgctggacgagcacgacgtggccaagtccatcatcgagttctcggcgcacgcggcggtggagaagctcgtcctcggcgccacggcgaggggcggcttcgtccggttcaaggcggacatcccgaccaccatctccaagggcgcgccggacttctgcacggtgtacgtcgtgaacaaggggaaggtgtcgtcgcagcgcaactccatccgccccgcgccgcgggtgtcgccgctccggtcgcagatccagtcgctgcagagcgccacggcggcgacgcccaagcccgagccgccgccgcagtcgcagcggtggtcctcgtcgtcgaggggccagtctgaccacggcgagacgccgcgggtggacaacttccgctcgccgttcgcgcgcgggggccccggcaacacccgcaagtcgtacgccgacctcagccacatgtccatgccggactcggccgacatctcgttcgtcagcagcaccggccgccggagcgtcgagcaatactcggcgatcccgccgcggatgtccaatggctccgtcgatagctacgaccacagcttcgagatgtcgcgcacgcccagcaagtggggcggcgactccttcggcggcggcatggaccacaccaccttctcgcagagcagcagctcttccttctgctccctcggcatgcaggacgacgtggaggcggagatgaagcggctacgcctggagctgaagcagaccatggacatgtacagcacggcgtgcaaggaggcgctgacggccaagcagaaggccatggagctgcagcggtggaagatggaggaggagcagaagacgcaggactcgcggataacggaggactcagccatggcgatgatcgagcgggagaaggccaaggcgaaggcggccatggaggcggcggaggcgtcgcagcggatcgcggagatggaggtgcagaagcggatcagcgcggagaagaagctgctcaaggaggccgaggagcgcaagaaccgcggcggcagcggcatgtcccacgaggtccggtaccgccgctacgtcatcgaggagatcgagcaggccaccaacaacttcgacgacacgcgcaaggtcggcgagggcgggtacggccccgtgtacaagggcttcctggaccacacgcaggtcgccatcaaggtgctccgccccgacgcggcgcagggccggtcgcagttccagcaggaggtggaggtgctcagctgcatccgccacccaaacatggtgctcctcctcggcgcgtgcccggagtacggctgcctcgtgtacgagtacatggccagcggcagcctcgacgactgcctcttccgccgctccggcaccggtcccgtcatcccctggcagcatcggttccgcatctgcgccgagatcgccacgggcctgctgttcctgcaccagaccaagccggagccgctggtgcaccgcgacctcaagcccgggaacatcctgctggaccgcaactacgtgagcaagatcagcgacgtcgggctggcgcggctcgtgccgccgtccgtcgccgacaccgtgacgcagtaccggatgacgtccacggcggggaccttctgctacatcgacccggagtaccagcagacgggcatgctggggaccaagtccgacatctactccttcggcgtcatgctgctgcagatcatcacggcgaagccgcccatggggctgtcgcaccacgtcggccgcgccatagagcgcggcgcgctgctggacatgctcgaccccgccgtgccggactggcccctcgaggaggcgcagtgcctcgccgagatggcgctccgctgctgcgagctgcgccgcaaggacaggccggacctcggcgccgtcgtgctcccggagcttaaccgcctgcgcgcgctcggcgaggacaacatgcagtactgcggcggcgccatgatcaggggcggtggcggtggctgcggcggcggcggcggcatgtacagctcgccgttccacagcaacatctcacggtcgcacgcagccgagatgatggtggattctcagtacccaagatcagtgttcaactcaagagcgagcgattcgcccaagccgccgagaagatcgaacgcttga

SEQ ID NO: 4053 - DNA, 3151 bp, Hordeum vulgare subsp. vulgare
gaagagcgctccaaaaattaaagagccctcagggccgccctccctctcgttgcccacctccccggcctccggacgacggcgaccgaccgaccgaccgacggcgacgcctgtcgatgggcaaacatacatgcatgcatgcataataaccttagctagctaggagccacgaccattaatctgtggagatatcaccgaccagtagcaaggttggcggtgaagcccgatcggcatctatcgatggggaggtacgacggcggtaaggaggcggcggacacgcagctgggctacccgctggtggcggtgtgcatcgacaaggacaagaacagccagaacgcgctcaagtgggccatcgacaccatcgtgggcaagggccagaccatcgtcctcgtccacgtcaacaccaagggcgtctccgtcggcgtggaggacgccgccgggttcaagcagcccaccgacccgcacctcaaggagctcttcctcccgttccgctgcttctgcacccgcaaggacatccagtgcaaggatgtggtgctcgacgacaacgacgtcggcaagtccatcatcgagttcgccgcccatggcgccatcgagaagctcgtcaccggggcatgcacgcgcggcggcttcgtcaggttcaaggccgacatcccgaccaccatctgcaagggcgcgccggacttctgcacggtgtacgtgatcaacaagggcaacaaggtgtcggcgcagcgcaactccatccgcccggcgccgcgcgtgtccccgctccggtcgcagatcgtcaacatgagcgcggcggcggccgccaagccgccggagccggccatgccagtgccggcgaaccagaagtggtccatgtcgtcgaggggcaacgataacggggagacgccgagggtggatcccttcatccgctcgcccttcacgcgcgggtccatggggccgacgaggaagtcgtacgccgacctgagccacatgtccatgcctgacgcggccgacatctcctttgtcagcggcggccgccggtccaccgcggattcgtcggacatctccttcatcagcagcaacggcggcggcggccgccggagcatcgactactaccagcagtccgcgccccgtatgtccaacggctcgtccctggacagctacgaccacagcttcgagatgacgcccaacaagtggggcggcgactccttcaccggcgacatgtccttctcgcagagcagcgcctcctccttctgctccagtggcatggacgacgtggaggccgagatgaagcggctccgtctggagctcaagcagaccatggacatgtacagcaccgcctgcaaggaggcgctgaacgccaagcagaaggcgaatgagctccagcggtggaaggcggaggaggagcagaagaggcaggaccagcacatcaccgaggagtcggcgctgcagatgatcgagcgcgagaaggccaaggccaaggcggccatggaggcggcggaggcgtcccagaggatcgccgagctggaggtgcagaagcggatcagcgcggagaagaagctgctcaaggaagccgaggagcgcaagcatcgcggcggcggcggcggcggcggcggcggcgagctccggtaccgccggtacacaatcgaggagatcgagcacgccacggcgcacttcgacgacgcgcgtaaggtcggcgaaggcgggtacgggcccgtgtacaatgcctacctcgaccacacccaggtcgccatcaaggtgctccggcccgacgccgcgcaggggaggtcgcagttccagcaggaggtggaggtgctgagctgcatccggcaccccaacatggtgctcctcctcggcgcgtgcccggagtacggctgcctcgtctacgagtacatggcgaacggcagcctcgacgactgcctcttccgacgcggcggcgccaccggcgggccggtcatcccatggcagcaccggttccgcatctgcgcggagatcgcgacggggctcctcttcctgcaccagaagaagccggagccgctggtgcaccgcgacctcaagcccggcaacatcctcctggaccgcaactacgtgagcaagatcagcgacgtcgggctggcgcggctggtgccgcccaacgtcgccgacaacgtgacgcagtaccggatgacgtcgacggcggggaccttctgctacatcgacccggagtaccagcagacggggatgctgggggtcaagtcggacgtgtactcgctgggcgtgatgctgctgcagatcatcacggcgaagccgcccatggggctgacgcaccacatcgggcgcgcgctggagcgcgggacgctcggcgagctgctcgacccggccgtgccggactggccggtggaggaggcgcagtgcctggcggagatggcgctccgctgctgcgagctgcggcggaaggaccggccggacctcggcaacgtcgtgctcccggagctcaaccgcctgcgcgcgctcggcgaggacaacatgcagttctgcggcggcgccatccagggcggcctcggcggcggcaggcacagctcggcgtaccacagcaaaaccacggcgtcacgcgccgccgaagcgaacaacgatccttacccgatgaagtcggtgttcagcagagcgagcgaatcggccatgccgccgagaagatccaacgtctgacgcgtcgaccatgcgctgggctggccgtggtgtggtgtggttgccttggtgcgtgcaggtgcagggccggggaagggaagaagatcgaacatgcgacaagatggcattttcaaattgtgtttgattgtgagtttaatggtataatcgtagctgcctagcatgagagggttgggggagctggagctgtttttttgcttacagtgattagacaaagatttgtgcaaaatctccttgtacaagatgtcgctaatacagaacaatgtggctctgccattgccgtgtaccagacgtggccgtaatttgtgactatctgcttatttctctcgagggcagtgggaaagttcggtaacaaaggttgtgccacgcgggttggtcggaattaaatgcatagaaccccactttagcatcacttgcataaatttccgtgcgttgtaacaggagacattgttacctttctcatatgtgaacaaatttcttcggtttcatc

SEQ ID NO: 4054 - DNA, 636 bp, Sorghum bicolor
atgaccatggctgcctcttcggctctcaggctaatcctgggctcctcgtcggcgtcgcgccgccagattctgtccgagatgggatacaagttcactcttcttagcgcggatatcgacgagaaagcgatcagaaaggagaaaccagaggaactggtggtcgccttggctcatgcgaaagcagatgctatactggagaagatgcagaacaatgggatgatgaaagagattgttgattctcaagagactactctgatgataactgctgaccaagttgtgattcatgatggagtgattagagaaaaacctagcactccagaagaggcacggaaattcatcaaagggtactctgaaagccatgctgcgacgattggatctgtgcttgttacaaatgtgaagactggagctagaagggaaggatgggataaagcagaagtttatttccataaaattcctgatgaagttgtggagagtttgattgaggagggtaacgttttctatgtcgctggtggtctccttgtggagcatcccctaacttcccctcttgtggaagccattgttggtacaattgatagtgtaatggggctacctaaagcgctcacggagaagctcatcaaggaatccctttcggagccatag

SEQ ID NO: 4055 - DNA, 1052 bp, Zea mays
ctacggcccacggaaccagtcagtcctctctccttccggcttccgctgctcttctttctttcctggcatcttggagacggcggcgagacgaggagaggactggaccatggctgcctcttcggctctcaggctaatcctgggctcctcgtcggcgtcgcgtcgccagattctgtccgagatgggatacaaattcacgcttcttagtgcggatatcgatgagaaagcgatcagaaaggagaacccagaggaactggtggtcgccttggctcatgcgaaagcagacgctattctggagaagatgcagaacaatgggatgatgaaagagattcttgattctcaagatactactctgatgataactgctgaccaggttgtgttgcatgatggagtgattagagaaaaacctagcacaccagaagaggcacggaaattcatcaaagggtactctgaaagccatgctgcgacgattggatctgtgcttgttacaaatgtgaagactggagctagaagggaaggatgggataaagcagaagtttatttccacaaaattcctgacgaagttgtggagagtttgatcgaggagggcgatgtgttctatgtcgctggtggtctccttgtggagcaccccttaacttcacctctcgtggaagccattgttggtacaattgatagtgtaatggggctccctaaggcgctcacggagaagctcatcaaggaatccctttcagagacatagctacaatcctatggactgaactgacctgtaatgcagaaatcatattggtggcggactggcggtggctaaatcagtttggcagcaatgtagtgtgagaatcatgtaaccattcctattttccaacaaaaaaggccgtcatgtgatcagcccactatgaacggaattcatccttggcttccatgaccataggtctgctgaatcattcgttttgttttctgtaatgtgttcggccgcaaggatttttaacgcctggcagattgcttgatttgatctatgaattcgtgctaggtgctctgtggcaaaaaaaaaaaaaaaa

SEQ ID NO: 4056 - DNA, 950 bp, Hordeum vulgare subsp. vulgare
ggtcctcggtctcggagagagagagagagagagaggggaaaaaaacaatggccgcctcttctgctctcagactgattctcggctcctcgtcggcgtcgcgccgccagattctggccgagatggggtaccagttcaaattactcagcgcggacattgacgagaaggagatcagaaaggagaagccagaggaactggtggttgccttggctcacgcgaaagccgatgcaatattggataagatgcagaacaatgggatgatgaaagagattgttgattctcaagagactaccttgttgatcactgctgaccaagttgtgattcatgatggagttattcgagaaaaacctaccactccagaggaggcacgtaaattcatccaaggatattcccaaagccatgcagcgacaattggatctgtgcttgttacaaatgtgaagactggtactagaagggaaggctgggataaatctgaagtttatttccacaagatacccaatgaagttgttgagagcttgattgaggagggcaacgtcttctacgttgctggaggccttctagtagagcatccactgacttcacctctcgtggaagccattgtcggtacaattgatagcgtaatggggcttcctaaagctctcacagagcagctcatcaatgattccctccaagagccgtagctgcaaatttccaaactaagctggctggcgctgtggaaatctctttgttggaaaatcactattcttgtgccgaacaaaattaaacactcatcctttctggcaaacggagtggattctaatcagcgtcgtcagcctcgctataccaaatttattaggctgaattttagcagccactaaattcctcttggtggccaagtgaactgggtaggtaaccagtaacacttttggagacctttctgtgactaacaccgcatcaatgggcttcattcttcc

SEQ ID NO: 4057 - DNA, 2953 bp, Oryza sativa Japonica Group
agtgcggatattgacgaaaaggagatcagaaaggagaagccggaggagcttgtggtcgcgctggctcatgcaaaagtaactcctttcctcctcctgttattcaagaacttggattctagttccttcgctaggaaggagaagtactgaagtactttcttaggaaggatagagaagagggggaggggagttggacctagcctgacaatttttggtttggttgtagactacttgtctattacaactattaaagagatagaaagagaatgtaacatgttacatgttcactctacagggctagaaattctgctttagttagaggaaaaaatgattttggtgggtttggattatgatagtgtagattggttgcatatacactagaattgttacatttggactattagtgtaattatacttttatcaataggtataaaaattgtatagcagatatattttcagagggatagtctattagtttcacttgtgtgggtcagcaggacgttcggctaggttttactatttactgcgagagaaacattttagggggacattttggaggtttgggcatgaaaaggtctgtccttttatcaacttccattaatttattgtatctgcttcaaaagttttatgttttcctggttctagatacaattttctttcagtgctgtagtgcagaactgcagactacagttcaactgtgcagcacattctgaattaggcattgactatgtactatgttactatggtttattaattttgcaggcagatgctataatggagaagctgagggataatgggatgatgaaggaaattcttgattctcaagagactacactgttgataactgcagaccaggtgtgtggcttacatctacttatgagataactgcttaatagtcagtaatgtgttgtggtgagatgattttaactagtttgtgtagatattgcagccaatttaaacaaacactagtctaggctgaattgttgttaaaagcgttcttgtggctgcatatttcaaaattgggttcagctgcttgtgttttttttctctgtttgattttaaacttatatgccgctcaaaagataatagtattgaccatcaaacatgcctattgattataagggcagtctcatagttattagggtatactaggatgggttctgaaggagtatgtgtaatattactgattgatccatctccagaggcataacctgtttgtttgcctgactcatattcatatgcttggcatcttgccattgttattttgatctgtagtctactcatgtttgatcagttatgcactgacttatagataatcataagcattcctatgtttgtgatttccctatgacttgtaacggaaaattggaaactgaaccttccatagccattgctaactaccttcatctgtttgtcatgactcatgaggcaaactagtttttgtagggcacattattatgacattagtgatttatggcttcatgggtaatcatgtttagcatatgcttggtctaaccgaaatacttagggatggttctgtagtaaaatgcatcattaatggcactcaactcacatgtatttagatgaacattttggttcttatttgttttttatccttctcatttttactttctgatggaggttgtggttcatgatggagtgattagagaaaaacctagcaccccagaagaggcacgaaagttcatcaaaggtttgtgctattgtgtataagctcaagttttgttcagatagtcctttccctgtattgcttgctggctgctgctcaactatattccgtttacaggatactccgaaagccatgcagcgacaattggatctgttcttgttactaatgtgaaaagtggagccagaaaggaaggatgggacaaagctgaagtaatacctaaatttcttgatgttttatttcggaacaggacatcaaagtcgtgcataaaacctcagagactagatttcatttttaactccaactctatttcaaggagagacctgaaacttgaactactgtgaatagttcaaatttgttattcttctaatatgattgggtgcgtgtgtaattatagcttccacttcaaacttggccgagcttttaatctgatttaagtgaactatgcaaattgcctcaagctctaaattctaatgttgtttagtgcttatcacttctgaaatctggtgggctaacttgtatcaaacattcagattctgagtcacttgtgatctttgtaaagtgatgggccagattgagactgatgtgaatgtttaaactaattgtagaacgctaattttttgcatcctgatttggctcagaagtattagctttctaggtcttcatgtagaattaggtgcacaatcagatcacactatcattgtttgtagacaaaaaaaattcaaactaatcctaatgattaaacataatcagttaggaccctatattgccattgatatgagttctggaggtggtttttggcctgataataactttccactataattgtctatgaacaggtttatttccataagatacccgatgaagttgttgagagtttggtaagtttgtagccattggtcgcaaaagttatttcttgctattttggcactatatttttgattccggagtttgattactttgatactttgactcagttgaacaatgtttttcacctgtttatatttcagattgaggagggcgatgtcttctatgttgccggtggcctgctggtagagcacccgctgacttcacctcttgtggaagctattgtgagtgtagttcttgcatatcctgcttcttggttcagcactgaaaatagaaacctttttacacatggtactcgcctgacatttgataaactcttatgaaggttggcaccatcgacagtgtaatgggactcccgaaatccctcacggagaagctgatcaaggagtcccttgaggagccata

SEQ ID NO: 4058 - DNA, 2155 bp, Zea mays
ccccgtcgcagtcgcacctgcactgcatcctgcgcctgcccgatacccaattattctccctctctatggatcaccaccgcacgccgatggagaactcggcgtcctcgaagccgccgacgccggcgtccacgcccaactcgcgcctcgcatcggcgccgtcaccccgccactccgccacgccgccgcacgcgtccgcgccggcgtccgccccggcgccggcctcgcgcaccgtctacagcgaccgcttcatccccagccgcgccggatccaacctcgcgctcttcgacctcggcccctcgccctcgcccgccgccgccgccgcctcctcgtcctcctcccacgaggccggccccgcggcctcgtccggatctgcgcccgccgcggcgtcgccctactgcgcgctcctccgcgccgcgctcttcgggctcgacacgcccgaccgggtcgcgtcctcggccgccgcgtgctcgtcctcctcctcctccccggggctctcgcctgtgggcacccccgccaccgggaacatcttcagattcaagacggaggtgcgccggaacgccaagagggcgcttttttccggaggggaggaggaggaggacgccctgttccccggcattttcaccaccaggggcgcgggaccaaggaaggtcccgaggtcgccctacaaggtgctggatgcgcctgcgttgcaggacgacttctacctcaacctcgtcgattggtcttcacataacgtcctcgctgttgggttgggcaattgcgtttacctgtggaatgcatgcagcagcaaggtcaccaagctttgcgatttgggggtggatgacaacgtttgttctgtggggtgggcgcagcgcggcactcaccttgcagtaggaacaaatcaaggaaaagttcagatctgggatgcaactcgctgtaaaagaataaggacaatggaaagccatcgcatgcgtgtaggtgctcttgcatggagttcttcgttgctttcttctggaagccgtgacaagagcatcctccaccatgatatccgtgctcaagaagatcatgttagcaagcttaccgggcataaatctgaggtttgtggactcaagtggtcttatgacaatcgtcagcttgcatcgggtggcaatgacaacagactttttgtttggaatccacattcagtacagccagtactgaagtatactgagcacacagcagctgtcaaagctattgcctggtcacctcatctccatgggctgcttgcatctggtggaggaactgcagatagatgcatacgattttggaatacgaccacaaatgcacacttgagctgtgtggacactggcagccaggtctgcaatctcgcgtggtcaaagaatgtaaatgagcttgttagcacccacggctactctcagaaccaaataattgtttggagatatccaacaatgtcgaagcttgccactttgacagggcatacatacagagtattgtacttagctatttcccctgatggccagaccatagttactggtgctggtgatgaaacgctccggttttggaacgtgttcccctctccaaagtcccagagttctgatagtttaagttgtgtcggaggaacatctttcgttagaagctacatccggtgacaccgagttgtagttttgctgagctcataggactgttgcagcacatgttgatgaccatcaacatcactccatttgcatcaaccatcaaaggtagcccactttttgagatggcgcgatacagtttggtgaaccggcttgcgaatccaggcatggctctttttgctaggagtgtacatatttatcagagcaacggctttataggagtggacatagaggaggggggcttcaagcatcagcattgtcccaactgataagaatacgcccttttgtttgtttgctcaatacgtcggcttgagctgtttgtgtagtgcgcgagcagctaacctattcgaaacatttaccggactgtgaacacgcccacttcatccatgttggcaccatggtgtaaaatgagaacactcgtggctccaggtttattttatagtgtcttggaaggaggggctgattttgccctcacctggcttgtttcacatagagacaaccaagaaacgtgtgttcattgtttattgagatatggataccaaagc

SEQ ID NO: 4059 - DNA, 2186 bp, Sorghum bicolor
aagccttagttatccacccaccccgtcgcactcgcaccgcatctcccccgatccccaattcctcccattctccacgaccctcgccgcccatggatcaccacctcacgccgtcgccgccgtcgccgatggagaactccgcggcggggccgtcctcgaagccgccgacaccggcgtccacgcccaactcacgcctcgcctcggcgccgtcctcccgccactccgccacgacgtcgcacgcgtcggcgccgtcgtcggcaccgacgccggcctcccgcaccgtctacagcgaccgcttcatccccagccgcaccggatccaacctcgcgctcttcgacctcgccccctcgccatccgccgcatcctcctcccacgaaggcgggcccgcggtctcgtctggatctgcgaccgccgcgtcgccctactgcgcgctcctccgcgccgcgctcttcgggcccgacacgcccgaccgggtcgcgtcctcggccaccgcgtgctcgtcgtcctcctccccggggccctcgcctgtgggcacccccgccaccgggaacatcttcagattcaagacggaggtgcgccggagcgccaagagggcgcttttctccggagaggaagaggaggacgcactgttccccggcattttcaccaccaggggcgcgggcccaaggaaggttccaaggtcgccctacaaggtgctggatgcgcccgctttgcaggacgacttctacctgaaccttgtagattggtcatcacataatgtcctcgcagttgggttgggcaattgtgtttacttgtggaatgcatgcagcagcaaggtcaccaagctttgtgatttgggggtggatgacaatgtttgttctgtgggatgggcgcagcgcggcactcacctagctgtaggcacaaatcaaggaaaagttcagatctgggatgcaactcgttgtaaaagaataagaacgatggaaagccatcgcatgcgtgtaggtgctcttgcatggagttcttcattgctttcttctggaagccgtgacaagagcatcctccaccatgatatccgtgctcaagaagattatgttagcaagcttaccgggcataaatctgaggtttgtggactcaagtggtcttacgacaatcggcagcttgcatcaggtggcaatgataacagactttttgtttggaatccacattcagtacaaccagtactgaagtatactgagcacacagcagctgtcaaagctattgcctggtctcctcatcttcatggcttgcttgcatctggtggaggaaccgcagatagatgcatacggttttggaatacgaccactaatacaaacttgagctgtgtggacactggaagccaggtctgcaatcttgcgtggtcaaagaatgtaaatgagcttgttagcacccatgggtactctcagaaccaaataattgtttggagatatccaacaatgtcgaagcttgccactttgacagggcatacatacagagtattatatttagctatttcccctgatggccagaccatagttactggtgctggtgatgaaacactccgtttttggaacgtgttcccttcaccaaagtcccagagttctgatagtttaagttgcatcgggggaacatcatttgttagaagctacatccggtgacactgaaatctagttttgctgagctcgtaagattattgcagcatatgttgatgatcatcaacatcattccatttgcaacaaaccatatcaccaggtcatcaaccatcaaaggtagccgaatttttgagatggcacgatgcaatatggtgaactggcctgcgagaatccgggcatggctcttttactgagagtgtacatatttatcagagcaacgtccttgtaggagtgaacactgcggaggcttcaagtatcagcattgttccgttccaactgataagaatacgccctttcaattttgctcttttgcaggtcaaacctcgacctgagctgtttctgtagtgtgctagcagttaacctattcgaaacatttattgacctgtgacgcccatttcatccatgttggggttacacggtgtaaaatgagaacacttgtggttccagattcattcctagtgccttgaaaaggagggctgattttgccctgaagtggcttgtttcacaataagagacaataatgaaacgtgtgttcattgttta

SEQ ID NO: 4060 - DNA, 2028 bp, Oryza sativa Japonica Group
atccccaaatctctcgcccccacccatggatcaccaccaccaccacctgccgccgccgccgccgcggtcgccgatggagaactccgcgtcctccaagccgcccaccccggcgtccaccccgtcgtcgcgcctcgccgccgcgccgtcctcccgcgtctcctccgcggcgccgcacccctccccgtcctcctccgcgcccacgccggcctcgcggacggtctacagcgaccgcttcatccccagccgcgccggatccaacctcgcgctcttcgacctcgccccgtcgccgtcccaccacgacgccgccgccgccgccgcctcccccggcgcgccgcccccctccggatctaccccggcctcgtcgccctactgcgcgctcctccgcgccgcgctcttcggccccaccacgcccgaccgggtggcgtcgtcggcgtccgcgtgctcctcctcctcctccgccggggcgtcgcccgtgggctcacccgccaccggcaacatattcaggttcaaggcggaggtgccccggaatgctaagcgcgcccttttctccgacggggacgacgagggcgtgctcttccccggggtgttcacgacgaggggcactggccccaggaagatccctaggtcaccttataaggtgctggatgctcccgcattgcaggatgacttctacctgaaccttgtggattggtcttcgcataatatccttgcagttggattggggaattgtgtctacttatggaatgcatgcagcagcaaggtcaccaagctatgtgatttgggggtggatgacaatgtctgttcagtgggttgggcacagcgtggcactcaccttgctgtagggacaaaccaaggcaaagttcaggtatgggatgccactcgttgtaagagaataagaaccatggaaagccatcggatgcgagtaggtgctcttgcatggaattcatcattgctttcgtcaggcagtcgtgacaagagcatccttcaccatgatatccgtgcccaggatgattatattagtagacttgctgggcataaatcggaggtctgtgggctcaagtggtcttatgataaccgtcagcttgcatctggtggtaatgacaacagactttatgtatggaatcaacactcggcgcacccggtactgaagtatactgagcatacagcagctgtcaaagctattgcgtggtcacctcatcttcatgggctgcttgcatctggtggaggaactgcagatagatgcatacgattttggaataccaccacgaatatgcacttaaattgcgtcgacacaggcagtcaggtctgtaatcttgtatggtcaaagaatgttaatgagcttgttagcactcatggatattctcaaaatcagataattgtttggcgatacccaacaatgtcaaagctcgccacattgacaggccatacatatagggtattatatttagccatctccccagatggacagactatagtaactggcgctggtgatgaaacgcttcggttttggaacgtgtttccatctcccaagtcccagagttctgacagcctaagtagcatcggggccacatcatttgttaggagctacatccggtgacactgagatgtggtaatctaataacacttggctcataagtcataacactactgcagcagagtgttgatgatcatcaatatcattccatttgtaccacttgcatcaccagttcatgaaccatcaaacctagccaaattttagagatagtaggatgcagaatggtgaaactggctcgcagacctcggagtggctcatttgctgaatgctgtatatatttattcattggctttgtaggagcgaagatggcaaacactgaccatccgcaatgtaccattgataagttcacggcctcctgtttttgtttttgctgagtcaacttggagctggagctcttatgtataccatgctagggcttaacaacattggccaactcatgatgctcattgcatccaagttggaatatgctaaggaagctggagaatttctggtgc

SEQ ID NO: 4061 - DNA, 3404 bp, Oryza sativa Japonica Group
ggtctacagcgaccgcttcatccccagccgcgccggatccaacctcgcgctcttcgacctcgccccgtcgccgtcccaccacgacgccgccgccgccgccgcctcccccggcgcgccgcccccctccggatctaccccggcctcgtcgccctactgcgcgctcctccgcgccgcgctcttcggccccaccacgcccgaccgggtggcgtcgtcggcgtccgcgtgctcctcctcctcctccgccggggcgtcgcccgtgggctcacccgccaccggcaacatattcaggttcaaggcggaggtgccccggaatgctaagcgcgcccttttctccgacggggacgacgagggcgtgctcttccccggggtgttcacgacgaggggcactggccccaggaagatccctaggtcaccttataaggtgagaagtgttcgccttcgatttcatagtttctttcaattgatatggtctgtttcttgattgatgtttctttgaattgagaaaaacatggtctttattattcatctgctctgtaccaagaatcctgtgttatttgtcatgcataaagagactgatatgaaagcttattactcaaaatctcacatgaattttccttctgttgctcttaggtgctggatgctcccgcattgcaggatgacttctacctgaaccttgtggattggtcttcgcataatatccttgcagttggattggggaattgtgtctacttatggaatgcatgcagcagcaaggtgagccaactgcggccatccatgcgcattcttgtttgggtacttgaagagggtttgtaaagaagtttattgctgtgcaggtcaccaagctatgtgatttgggggtggatgacaatgtctgttcagtgggttgggcacagcgtggcactcaccttgctgtagggacaaaccaaggcaaagttcaggttagacgtatgcccctttctgaaatgatcagataacatagtcatgatccaccaaaatttggaacgatgccttagcttaatctttatctagagtgtcaatggaaacattgagaagtatacaactcacttatggaaagatcagaaaaattgcaatactattaacagtggacctaatttttcgcacaaataatatatgatagacgcagtagagttttatgactaaactgaatgactttcatttttactccaaagaatgaatttggtccattgtaatctctgtttacaaatgtgctgtagtatttgatgattatcgattaatcctgttgagctctgaaattggtatgcaatgctacaatttcaatttggtgtctgactgtcaccttggattttatcttatttaggtatgggatgccactcgttgtaagagaataagaaccatggaaagccatcggatgcgagtaggtgctcttgcatggaattcatcattgctttcgtcaggcagtcgtgacaagagcatccttcaccatgatatccgtgcccaggatgattatattagtagacttgctgggcataaatcggaggtgatctattttatacatcattatgaattttccgacatgtcagattcttggattatcctattgtgctcccttttgatatattcttataatatgcatattctgtttccaaacacctttcaggtctgtgggctcaagtggtcttatgataaccgtcagcttgcatctggtggtaatgacaacagagtaagaatgcatccatgaattgtttcttgattggatcattggtattacatggaattcaaggttgcaatttcttatgtccatatcaatgtctcttttccagctttatgtatggaatcaacactcggcgcacccggtactgaagtatactgagcatacagcagctgtcaaagctattgcgtggtcacctcatcttcatgggctgcttgcatctggtggaggaactgcagatagatgcatacgattttggaataccaccacgaatatgcacttaaattgcgtcgacacaggcagtcaggtattttgctacacatctaatttctttagtgattgtgcagcccatgtttatagttctgaactttaatgaactcttgtttattctatttatagtaccatattaaataccgtggtatatggtatgtgaaataagcatgataactctcaatctttggacgcacttaaaaaattgaacatttctttagtcatgtcagttccgaaaagtaagaaatgtaggctgagctctattttcaatagtgaagttctatttcttgttttcatatctgaaaccttcacagaaatgccatgtcattaagactgtagagttaagcatattgttttttggtatgtactgaggacgctgagtgaatcttgaataggtctgtaatcttgtatggtcaaagaatgttaatgagcttgttagcactcatggatattctcaaaatcagataattgtttggcgatacccaacaatgtcaaaggtatgcttgcaagcttattcttaactcagtacgctttacctttttcttgtattaattgtgctcgatttctcctttgtagctcgccacattgacaggccatacatatagggtattatatttagccatctccccagatggacaggtgaagttatctcttgagtctttgaatctactgaattctgtttattgtatctagaatattttggcatagctgtgtttttgacattttatgtcaacagactatagtaactggcgctggtgatgaaacgcttcggttttggaacgtgtttccatctcccaagtcccaggtaccttttttaaaaatagtataattggtccttatttcaatttgaatgaaatttcactttcatatatagcttctaaataataattggtccttcaattacagagttctgacagcctaagtagcatcggggccacatcatttgttaggagctacatccggtgacactgagatgtggtaatctaataacacttggctcataagtcataacactactgcagcagagtgttgatgatcatcaatatcattccatttgtaccacttgcatcaccagttcatgaaccatcaaacctagccaaattttagagatagtaggatgcagaatggtgaaactggctcgcagacctcggagtggctcatttgctgaatgctgtatatatttattcattggctttgtaggagcgaagatggcaaacactgaccatccgcaatgtaccattgataagttcacggcctcctgtttttgtttttgctgagtcaacttggagctggagctcttatgtataccatgctagggcttaacaacattggccaactcatgatgctcattgcatccaagttggaatatgctaaggaagctggagaatttctggtgcaatgtcctattccagctggtgttgtttcttgcactgttgcacttctc

SEQ ID NO: 4062 - DNA, 1966 bp, Hordeum vulgare subsp. vulgare
ggggcgagaagccatcacaccccacccccacccccaccccccatcccccccgatccccaattcgcctcgccatggaccagcaccaccaccagcaggggcagccggcggacggcaactcgaagccgccgacgccgtcctccacgcccacctcgcgccacgccaccggagcggcggcggctccctggccgccctcctccgcctcctcggccccgccgcgcgggccggcgtcctcctcggcccccgccacgccggcctcccgcaccgtctacagcgaccgcttcatccccagccgcactggatccaacctcgcgctcttcgacctcgcccccgcacccgccccctccgccaccgcctcctcctcctccgccggatctgccgccccctcgccctactgcgcgctcctccgcgccgcgctcttcgggcccgacacgcccgaccgcctcgcctcctccgccgcggcctcctcctcctcctcccccgtcggctcccccgccggcggcaacatattccgcttcaaggccgaggtgccgcgcaacgccaagcgcgcgctcttcgccgccggggacgaccaggacctgctcttccccggcctcttctcccccaagggctccggccccaggaagatccccaggtcgccctacaaggtgctggacgcgcccgcattgcaggacgacttctacctcaacctcgtggattggtcctcgcacaatgtcctctccgtcggattggggaattgcgtctacctgtggaatgcatgcagcagcaaggtcaccaagctctgcgatttgggggcggacgacaccgtttgttccgtcagttgggcgcagcgtggcacacacctggctgtagggactaaccaaggcaccgttcagatatgggatgcaacacggtgtaaaagaatgagaaccatggaaagccatcgcatgcgagtaggtgctcttgcgtggaactcttcattgctttcttctggtagtcgcgacaagaacatccttcaccatgatctccgtgctccggaggactatgttagcaagctcactgggcataaatctgaggtctgtgggctcaagtggtcttatgataaccgtcagcttgcgtctggtggaaatgacaacaaactttttgtttggaatcaacattcggtacagccagtgctgaagtatactgagcacacagcagctgtgaaagctattgcctggtcacctcatctacatggccttcttgcatctggcggaggaactgcagatagatgcatacgcttttggaatacaaccacaaatacacacttgagttccatggatacagggagtcaggtgtgtaatcttgtttggtcaaagaatgtgaatgagcttgttagcacccacggatactcccagaatcagataatagtgtggcggtatccaacgatgtcaaagcttgccacgttaacaggacatacattcagagtattatatttagccatctcccctgatggacagacaattgttactggtgctggtgacgagaccctccggttttggaacgtgtttccgtctcccaagtcccagagttctgacagcttaagtagcattggagcgacatcatttgttaggagctacatccggtgattcgacgaaatgtagtttcgtcgagcttgtaaggttattgccgcgagtgctgatgatcatcagcaccactccattccacttgtaccacacgacctcgtccggtccatctgctgctgaagccagcaccattttagagattgcaaggtagaggatgattgaccggcttgcgcggacccggtcccctatgtcggggctgaaagcggtacatatttgttgctgtaggtgcgaaggtggcaaatgttcatgtcacagaaacatggaactgccgcgtccagcagaagattatttactcccctcctgtttatgttcccattggaactgatgacctgggaaccaaactgttccttgaaatcgacttactc

SEQ ID NO: 4063 - DNA, 2590 bp, Zea mays
ccgcgttactactggatctgactgacagacacactgcgtccgccgccttgaagctaatcttggtgacttggtcccgggctcccggccggcctccccaagattctcttgttctttcggaattccgtcattcctttgcagcctctccttcgcagcagaatccgcgtggaacaagtgctgcgcgtgttgctggaggtgagttttcacctcctccgcgttcttcttcaccgccaaaggcccaagaggaatttcgattggttgaagcgcgaatccgcggggttggcaggtcgatcctcccttggattgcagcgtgtgccatggttctctcctccaatcccaccaacaaggcagcagctcagctgtcacagccggcactgtagtgctttctagcctgctgctgggctccaatggcgtcctcaccttcgccttccccgggcaccatcagggcccccttgccgccttccagcgcaaccccgtcaccggcaaccaccacgcccacgccggcctccccggccccggtgacgcagcccaatgctaccccggccgaccctccctcgtcgccggtcgcgcctccccccgtcccctccgcatccacgccaccgccacagctcacttctccaccgccctccttgcctccgcctcctccagacgccgtgccaccaccgccacttgttgcctctccgccacccgccccagcagccgtagtgcccccaccctcgccgccggcgccggttgcagtgcccccaccacctacacctgctgccccgccaaaggcgtcgcctatacatataaggccccctgcggccgcgtcgccacccccaaccattctgccaacgcccaacccgccggctgacccaacgccgccgacattagcgcagccacctccaccacggcgccggccaccaagaacgcctcagacagaacctccacccctggcaccaccaccttctggaattcctgtcaaaccctctacgagcagtccctcaccgacatccgcagatcctttgatccccactccctctagcccctcacctccagggacgacaacgccaggctctggtagcactccatcggtgccagccccagcaatggcagccgatccagttcgcccggtaacgactgggggttcaaacaagtcgtctagtccagcctcacagagcagcggctccccagtagacagtggcggaatgtcttcaggtgcaaaggcaggcattggtgcagtcgttgccattcttgtgcttactagcttcgttggagctgcattttggtacaggaagaaacggaggagagttcatggataccatgctggcttcttaatgccttcgcctgcctcgactactacacaagtgctagctaaaacgaatttcagtgctgggagtcctgaatcaaaagattcaatgccagagttcagcatgggcaattgtcggttcttcacttatgaagaattgtatcaggtcacaaatggtttctctgcacagaacctgcttggggaaggtgggttcgggtcagtgtataagggttgcttggctgatggagagtttgcggttaagaaactgaaagatggtggtgggcagggggaacgcgagttccatgctgaggtggatattatcagtcgtgtgcatcatcgccatctagtatctcttgtagggtattgcatttcagatgagcagagattgcttgtctatgattttgtgcccaacaacacgcttcactaccatcttcatggacttggagtaccagtcttggaatggccatctagggttaaaattgcggctggttcagcacgcggaatagcctatcttcatgaagattgtcaccccagaataatccacagagatataaagtcctctaatattttgctggataataacttcgaggcactggttgctgattttggtcttgcaaggatagctatggatgcttgcactcatgtaactacacgagtgatgggaacttttgggtaccttgctccggagtatgcctcaagtggcaagctgaccgagagatctgatgtattctcatttggtgttgttctcttggagcttattactggtagaaagcctgtcgacgcgtcgaagccattgggcgatgagagccttgttgagtgggctaggccattgctcacgcaagcgctcgagaccggcaatgctggggagctggtggatgcccggcttaataggaactacaatgaagtcgaaatgttccgtatgatcgaagctgctgcagcctgtattcgacattcagcatccaggaggcctcggatgagccaggttgtgcgggtgcttgatagtctcgccgacgtcgatctgactaacggcgttcagccgggcaagagcgagatgttcaatgtcgcgaacacggccgagatcaggatgtttcagcggatggcgttcggcagccaggatttcaggaccgatttcagccagtccagctggagcagccagagcagaggccttgacgcatctggttccaggccattgtaaccctcgtcgtcgtagattcctacatctaactagctagggtgtttcgtgatgggttttgtacgtcatgtaattctttttgattggatcaatcgtgtgattattcttttgcc

SEQ ID NO: 4064 - DNA, 766 bp, Zea mays
ccttgacttcctcgctggcccataaatatatatctatctatcgccatcgagcaattataatctcacagaataataaaaatcatggggcaagcctcacggctcgtcctcctcgccgtcgtggcgctgctgtccgccggcctcctcccgcaggcgctgggtaagggtaggggaggcaggggacacggtggcgccgtcaacccgcaggtcgccggcatctgctctcgcaccccgttcccggaggtgtgcacgtccaccgccgggcggcacgcgtccaagtacccggtcatcgacaacctggccgtgctgaacatgcaagtggacgcgttcgccaagcgcaccgcgcaggcgcgcaagcacgtcgcgaagtcggcccgcaccatcccgccgcagcagacgcaggcgctcacgttctgcgacaccatgtacatgaacacgcaggacaccatcggcgcggcgcagcgggccatcacgttcaaggacaccggcaccgccaagatcatgctgcagctcgccgtccaggacttcgactcgtgcgaccgccccttcacccaggccggcgtccccaaccccatggggaagtttgacaaggagctcaaccagatggccaacaactgcatggctcttgcaaacatgatatgaaccacgcatgcaaccccagcgtgaggtgccatcgcatgcagggaatgcttgcattcatttttcatttaattgagaattcattgaaattatgagttatatatattgagtaactctatgtatttgttcc

SEQ ID NO: 4065 - DNA, 799 bp, Zea mays
agcaatcaatggccatctccctcatttcatgagcaacagaataaatgcaggtcagggacaattacacagagtttgctcaacgtaactcgtaatttcaatgaattcttaaatgaaaaccaagtgctcatcatgtccaagcattccctgcttgcggcgcgccgccacctcatgctggagtgtaagaacatgccaaacagtcgtccccggccgcatatgattcatatcatgtttgcaagcgtcatgcagttgttggccatctggctgagctccttatcgaacttacccatggggttggggacaccggcatgggtgaacggacggtcacacgagtcgaagtcctggacagcgagctgcagcatgatcttcgcggtgcccgtgtccttgaacgcgatggctcgctgtgccgcgccgatggcgtcctgcgtgttcatgtacatcgtgtcgcaggtcctgagggcctgtgcctgcggcggtggaatagtgcgggccgccaccgcgacgtgcttccgcgcctgcgctgtgcgcttggcgaacgcggccacctgcatgttcagcacggccaaattgtcgatgaccgggtacttggatgcatggcgcccggctgtggccgtgcaaacctctgggaatggggcgcgagagcagatgccggcaaccagcgggttgacggcaccgccgccatgcaccttgcccttgccgttccctaacgcctgcgggaagaggccggcagacaacaacgccacgagggcgaggaggacaagccgtgggtaggcttgccccatagtttattctgttaggtaaa

SEQ ID NO: 4066 - DNA, 2206 bp, Sorghum bicolor
atggcgacgaacagcacggtgacggtgctcatcctcgtcgctgcagccgtactcgcctgcgcgggcggcgcgcgcgggttctacctccccggcgtcgctcccgccgatttccgcaagaaggacccgctcgccgtgaaggtgaaccagctgagctccatcaagacgcagctgccctactcctactactccctccccttctgcaggccgggcaccatcgtcgacagtgccgagaacctcggcgaggtgctccgcggcgaccgtatcgagaattcactctacgtgttcgagatgatggagcctaggctgtgccagatcgtgtgcaagattactccgagccaagatgaagcgaaagatctgaaggagaaaattgaggatgagtaccgcataaacatgatccttgacaaccttcctttggtggtcccaattaagaggttggatcaagaggcacctactgtgtatcaacaaggtgtgcatatcggcatcaagggacagtactcagggagcaaggaggagaagcattttattcacaatcacttcacatttctggtgaagtatcacaaggatgcaaacacagatcttgccaggattgttgcctttgaggttaaaccatacagtattaagcatgaacctgatggcgattggagggggaatgctacaccccttaaaacatgtgatccacactcaagacgccttgtcgtagattctgattcacctcaagaagtagatgccaacaaagatatcattttcacctatgatgttaactttgaggaaagtcctatcaagtgggcatcacgctgggacacctaccttctgatggcagacgaccaaatccattggttttctatcgttaattcactgatgatagtcctcttcctctctgggatggttgccatgatcatgctccggactctttaccgtgacatcaacaagtacaaccagttagaggaccaggaggacgcccaggaggagacaggatggaagcttgtccatggagatgtgttcaggcctcctgccaatgctgacctgctgtgcgtatatgtcggtacaggcgtgcagttctttggaatgctgcttgtcaccttgctgtttgctatcctgggcctcctttcaccttcgaaccgtggagggctcatgacagcaatgctcctcctctgggtcttcatggggctgtttgcagggtacacctcctcgcgcctttacaggatgttcaagggctcagagtggaagaatgtcaccatcaagacagcgctgatgttccctggcatcgtgttcgcaattttcttcgtcctgaatacactcatctggggcgaaaaatcctcaggtgccgtgccattcaccaccatgtttgctctggtactcctttggttcggcatctccgtgccattggtctttgtcggcagctacctcggcttcaaaaagcctgccatggaggacccagtgaggacaaacaagataccacggtcgataccagagcagccatggtacatgaacccggtcgtctcagtgttgatcggaggcatcctgccctttggcgcagtgttcatcgagctcttcttcatcctgacatcaatctggctgcaccagttctactacatctttgggtttctgttcctggtctttgtcatcctgatcctaacctgtgcggagatcaccatcgtgctttgctacttccagctctgcggtgaggactaccagtggtggtggagatcctacctgacgtctggctcgtcagcgctgtacctgttcctgtacgccacgttctacttcttcaccaaactggagataacgaagacagtctcaggtgtactctactttggctacatgctcattgcctcctatgccttctttgtgctcaccggcaccatcggcttctatgcctgcttctggttcaccaggctcatctactcttcagtcaagatcgactagaaatctagggactacagttgtaacactgttttgtgggtttgcgaaagcagaagaccaaaagagaaataattggtaacgaacatgagaagttgagaatgtagctagtagcgtgcattatacaaggtgaaactttaaacgcaggttgtgtattcagatagggtatttacagttgattctggaacactacattagtttacttcgaagccactaattcagtgtgtacccttatagagaaggtttgtgatgttacaatcaaacggtttaacattttaaccatatc

SEQ ID NO: 4067 - DNA, 2276 bp, Zea mays
cggccggcgacgacttccccttccaacacccacctcgcccgtccctccctccccgcaccctgatcccccggcatccatccatggcgacgaacagcgcggtgattgtgctcctcctcgtcgctgctgccgtactcgcctgcgcgggcggtgcgcgcgggttctacctcccgggcgtcgcccccgccggtttcctcaagaaggacccgctcgccgtgaaggtgaatcagctgagctccatcaagacgcagctgccctactcctactactccctccccttctgcaggccgggcacaatcgtcgatagcgccgagaaccttggcgaggtgctccgcggcgaccgcatcgagaattcactctacgtgttcgagatgatggagcctaggctgtgccagatcgtgtgcaagattgctccaacccaagatgaagcgaaggatctgaaggagaaaattgaggatgagtaccgcataaacatgatccttgacaaccttcctttggtcgtcccaattaagagattggatcaagaggcacctactgtataccagcaaggcgtgcatatcggcatcaagggacagtactcagggagcaaggaagagaagcatttcattcacaaccacttcacatttctggtgaagtatcacaaggatgacacaggtcttgccaggattgttgcctttgaggttaaaccatacagtattaagcacgaatttgatggcgactggaaggggaatgctacactccttaaaacctgtgacccacactcaagacgccttgtcgtagactctgattcacctcaagaagtagatgccaacaaagagatcattttcacctatgatattaactttgaggaaagtcctatcaagtgggcatcacgctgggacacctaccttctgatggcagacgaccaaatccattggttttctattgtcaattcactgatgatagtcctcttcctctctgggatggttgccatgatcatgctccgaactctttaccgcgacatctccaagtacaaccagttagaggaccaggaggacgcccaggaggagacaggatggaagcttgtccatggagatgtgttcaggcctcctgtcaatgctgacctgctgtgcgtatatgtcggtacaggcgtacagttcttaggaatgctgcttgtcaccttgctgtttgccatcctcggcctcctttcacctgcgaatcgcggagggctcatgacagcaatgctcctcctctgggtcttcatggggctgtttgcagggtacgcctcctcgcggctttacaggatgttcaagggctcgcagtggaagaatgtcaccatcaagaccgcgctgatgttccctggcatcgtgtttgcaattttcttggtcctgaatgcactcatctggggcgagaaatcctcaggcgccgtgccattcaccaccatgtttgctctggtactcctctggttcggcatctccgtgccattggtctttatcggcagctacctcggcttcaagaaacctgccatggaggacccagtgaggacaaacaagatagcacggccaataccggagcagccatggtacatgaacccggtcgtctcggtgctgatcggaggcatcctgcccttcggcgcagtgttcatcgagctcttcttcatcctgacatcgatctggctgcaccagttctactacatctttgggtttctgttcctggtctttgtcatccttatcctgacctgtgcagagatcgccatcgtgctctgctacttccagctctgcggcgaggactaccagtggtggtggagatcctacctgacgtctggctcgtcagcgctgtacctcttcctctacgccacgttctacttcttcaccaagctggaaataacgaagaccgtctccggcgtcctatactttggctacatgctcattgcctcctacgccttctttgtgctcaccggcaccattggcttctacgcctgcttctggttcaccaggctcatctactcttcggttaagatcgactagagagtaacagctgcaacactgctccgtgggttttcgaaatcagagatcaagagagaatactaggtaacgaaccatcagaatttgagagggtagtgtgcgttatttttataaggtggaacttcaaacgtagggtgcttattcagtgctttagggtttttacagtttgattctggaacactaagtcagtttacttcgaagtcagtattttcagtgtgtatcccttacagaagaggtgtctgatggtataattcaactacttaacaatttaaccat

SEQ ID NO: 4068 - DNA, 2288 bp, Oryza sativa Japonica Group
cgacttctccctctccctcctcttccactctcctcctcctcctcgtgagctccgaggttgccgacgacgacgacgacgaggtctcacccatggcgacccgcgaggtgcccctcctcctcctcctcgtcgtcgtcatggtcctcgccggcgccggcgccgcccgagggttctacctccccggcgtcgccccccgcgacttccgcaagaaggaccagctggcggtgaaggtgaaccagctgagctcgatcaagacgcagctgccctactcctactactccctccccttctgccgcccggccaccatcgtcgacagcgccgagaacctcggcgaggtcctccgcggcgaccgcatcgagaactccctctacgtgttcgagatgagggagccgaggctgtgccagatcgtctgcaaaaccgcgctgacccatcaggaggcgaaggatttcagggagaagatcgacgacgagtaccgcataaacatgattcttgacaaccttcctctggtcgtcccgatcaggagtttgttggatgatcacgacgcgcccacatcttatcagcttggcgtccatgtcggcatcaagggccagtacgccgggagtaatgaggagaagcacttcatctacaaccacttatcgtttctggtgaagtaccacagggatgagaacacggatcttgctaggatcgttgggtttgaggtcaaaccattcagtaccaagcatgaatatgatggcgaatggaaggagaatgagacccggctcaagacctgcgatccgcattcgcgacgcctcgtcgtcgactccgattcgcctcaagaagtagaggccggcaaagagatcatcttcacctatgatgttaactttgaggagagcgatatcaaatgggcgtcgcggtgggacagctacctgctgatgacggatgatcagatccactggttctccatcgtgaactcgctgatgatcgtgctgttcttgtccgggatgctggccatgatcatgctgaggacgctgtaccgggacatctccaagtacaaccagctggagacgcaggaggaggcgcaggaggagaccgggtggaagctggtgcacggcgacgtgttccggccgccggcgcgcgccggcacgctgtgcgtgttcgtcggcaccggggtgcagttcctcgggatgctgctggtgacgctgctgttcgccatcctcggcctcctctcgccatcgaacaggggcggcctcatgacggcgatgctgctggtgtgggcgttcatgggcgtgctcgccggctacgcggcggcgcggctgtacagggggttcagggggtcggagtggaaggcggtggcgatgaggacggcgctggcgttccccggcgccgcgttcgccgtgttcttcgtcctgaacgcgctcatctggggcgagaggtcatccggcgccgtgccgttcaccaccatgaccgcgctggtgctgctctggttcggcatctccgtgccgctggtgttcgtcgggagctacctcgggttcaagcggccggcggcgacggaggactaccccgtgcggacgaacaagatcccgcggccgatacccgagcagccgtggtacatgaacccggcgatgtcggtgctcatcggcgggatcctgcccttcggcgcggtgttcatcgagctcttcttcatcctcacctccatctggctccaccaattctactacatctttggcttcctcttcctcgtcttcgccatcctcgtcgtcacctgcgccgagatcgccgtcgtgctctgctacttccagctctgcagcgaggactacgagtggtggtggaggtcgtacctcaccgccggctcgtcggcgctctacctcttcctctacgccgccttctacttcttcaccaagctcgacatcaccaaggtcgtctccggcgtgctctacttcggctacatgctcatcgcctccgccgccttcttcgtcctcaccggcacaatcggcttctacgcctgcttctggttcaccaggctcatctactcctccgtcaagatcgactagagcttaattacacttgcacttgcatgaatgcagtgtcattaacgtgcttgctcgagatactactagcatgtataagagttaatttgttaatcaggtcatgataaattggtaattaggctgctctcttatccccggatgcttcaggggatctacagtttagtcaagttgtactagtagcttttgatgtgtaatcctatatagttacattaaacaaagttttctgatacaagtgaagatttaaccacaggcatttttcagttg

SEQ ID NO: 4069 - DNA, 2248 bp, Zea mays
agaccttccgcgcaatccgccgcttctatcgtcgccgacgacttcctccttcagtccttcccctgtcttccacagttccacttcctcttcctcctgcccggcgcgctcccacctcctctcacaagccacacccatggcgacgacggcccatccggcgctcctcttgctcatcgtcctagcatgtgccggcgccgccagcgggttctacctccccggcgtcgcccccgccgacttccgcaagaacgacttgctcgccgtgaaggtgaaccagctgagctccatcaagacgcagctgccatactcctactactccctccccttctgcaggccggacaccatcgtcaacagcgccgagaacctcggccaggtcctccgcggcgaccgaatcgagaactcaccctacgtgttcgagatgatggagcctaagctgtgtcagatcgcgtgcaaggttgttctgaccgagcagggagcaaaggacatcatggagaaaatccacgacgagtaccgtgtaaacatgattcttgacaacctccctatggtcgtcccgattgagagattggatagagacgcgcctccattctatcagcaaggtgtgcacgtgggtgtcaagggccactacgctgggagtaatgaattcaagtatttcatccacaaccactactcatttctcgtgaagtataacaaggatgcacaaacagatctcgctaggattgtggcctttgaggttaaaccgttcagtcttaaacatgaattcgatggtgattggaaggggaatgcaactcgacttaaaacctgtaatacacaatctgagcatctaatagtgaactctgatgggcctgaagaagtaaaggcaaacaaagagatcattttcacctatgatgttaactttgaggaaagcagtatccagtggtcatcccgctgggacacctacctccgcacgcctgacgatcattggttttccatcgtgaattctctgaccacggtcctcttcctgtctgtgatggttgccatgatcatgctccgaactctgtaccgcgatatttccaagtacaaccagctagaggaccaggaggaggcccaagaggagtctggatggaagcttctccatggcgatgtgttcaggcctcctgccaatgccgacctgctgtgcgtgtatgtgggcacaggtgtacagttctttgggatgctgctggtcaccttgctgattgccatcctggggctcctgtcaccttcaaaccgtggagggttcatgacagccatgatcctgctctgggtcttcatgggcctgcttgcagggtactccactgcacgtcttcacaagatgttcggggggctggaatgggataaggtcgccatcaagacggtcttggtattccctggagtcgtcttcgtgatattctttgccctgaacatgctcctctggggcgtgaaatcatctggggctgtgccattcaccaccatgttggcactggttttcctgtggctcggaatctcaatgccactcatctttgtcggcagctaccttgggtttaggaagcctgccatagagggcccagtgaggacaaacaagatcccacgcctgataccgcagcagccatggtatatgaacccagccgtctcggtgttggtcggaggtatcctaccctttggtgcagtgttcatggagctcttcttcatcctgacaacgatctggatgcaccagttctactacatcttcgggttcctgttcctcgtcttcgtgatcctgatagtgacctgcgccgagatcaccatcgtgctttgctatttccagctgtgcagtgaggactaccagtggtggtggaggtcctacctgacgcccggctcgtcggctctgtacctcttcctgtatgcagcattctatttcttcacgaaactgcagatcacgaaggcggtctccggcgtgctctacttcggctacatgctcatcgcggcttatgccttctttgtactcaccggcaccattggcttttatgcctgcttctggttcaccaggcttatatactcttcggtgaagattgactaggaagctagaatgccatcgtttcatggtcggcaagagaaatcagaggtcaaagttgtgaaagaatacatgaaaatgtagcatggtttgtgcacagaagtaaggtgtccatagggtatctattcgtctgataattcagatacacttttgcgttcagtaaaacttgagtatgtgcgcgcattattatcataaaaaaaaaaaaaaaaa

SEQ ID NO: 4070 - DNA, 2371 bp, Zea mays
ctcacaatcacaagccacacccatggcgacgacggcccatccggcgctccccttgctcatcgtcctagcatgtgccggcgccgccagcgggttctacctccccggcgtcgcccccgccgacttccgcaagaacgacttgctcgccgtgaaggtgaaccagctgagctccatcaagacgcagctgccatactcctactactccctccccttctgcaggccggacaccatcgtcaacagcgccgagaacctcggccaggtcctccgcggcgaccgaatcgagaactcaccctacgtgttcgagatgatggagcctaaactgtgtcagatcgcgtgcaaggttgttctgaccgagcagggagcaaaggacatcatggagaaaatccacgacgagtaccgtgtaaacatgattcttgacaacctccctatggtcgtcccgattgagagattggatagagacgcgcctccattctatcagcaaggtgtgcacgtgggtgtcaagggccactacgctgggagtaatgaattcaagtatttcatccacaaccactactcatttctcgtgaagtataacaaggatgcacaaacagatctcgctaggattgtggcctttgaggttaaaccgttcagtcttaaacatgaattcgatggtgattggaaggggaatgcaactcgacttaaaacctgtaatacacaatctgagcatctaatagtgaactccgatgggcctgaagaagtaaaggcaaacaaagagatcattttcacctatgatgttaactttgaggaaagcagtatccagtggtcatcccgctgggacacctacctccgcacgcctgacgatcattggttttccatcgtgaattctctgaccacggtcctcttcctgtctgtgatggttgccatgatcatgctccgaactctgtaccgcgatatttccaagtacaaccagctagaggaccaggaggaggcccaagaggagtctggatggaagcttctccatggcgatgtgttcaggcctcctgccaatgccgacctgctgtgcgtgtacgtgggcacaggtgtacaattctttgggatgctgctggtcaccttgctgattgccatcctggggctcctgtcaccttcaaaccgtggagggttcatgacagccatgatcctgctctgggtcttcatgggcctgcttgcagggtactccattgcacgtcttcacaagatgttcggggggctggaatgggagaaggtcgccatcaagacggtcttggtattccctggagtcgtcttcgtgatattctttgccctgaacaggctcctctggggcgtgaaatcatctggggctgtgccattcaccaccatgttggcactggttttcctgtggctcggaatctcaatgccactcatcttcgtcggcagctaccttgggtttaggaagcctgccatacagggcccagtgaggacaaacaagatcccacgcctgataccgcagcagccatggtatatgaacccagccgtctcggtgttggtcggaggtatcctaccctttggtgcagtgttcatggagctcttcttcatcctgacaacgatctggatgcaccagttctactacatcttcgggttcctgttcctcgtctttgtgatcctgatagtgacctgcgccgagatcaccatcgtgctttgctatttccagctgtgcagtgaggactaccagtggtggtggaggtcctacctgacacccggctcgtcggctctgtacctcttcctgtatgcagcattctatttcttcacgaaactgcagatcacgaaggcggtctccggcgtgctctacttcggctacatgctcatcgcggcttatgccttctttgtactcaccggcaccattggcttttatgcctgcttctggttcaccaggcttatatactcttcggtgaagattgactaggaagctagaatgccatcgtttcatggtcggcaagagaaatcagaggtcaatgttgtgaaagaatacatgaaatgatgaaaatgtagcatggtttatgcacaaaagtaaggtgtccatagggtatctattcgtctgataattcagttacacttttgcgttcagtaaaacttgaggtatgtgcgctcattattatcacgcagtatacagaattgagatggtacttctagcctgaaatgctgagcatttcatgttgacatgttgtactccttctctttcatacaaaagatgagtcgtcattgggggcaggggcatgaccacagtctacaaaagataatactttcactatgttttctatgaggaagtaatatttcaattaaaagactgtacgatattgtaatattttttcatcataagtctagtaaaaatgattgtggtgtc

SEQ ID NO: 4071 - DNA, 2389 bp, Sorghum bicolor
attcggcacttcccctttctccttctcggcgcgctcccatctcctctcacaagtcacaaccatggcgacgacccacccggcgctcctcttcctcctcgtcctagcatgcaccggcgccgccagcgggttctatctccccggcgtcgcccccgccgacttccgcaagaacgacttgctcgccgtgaaggtgaaccagctgagctccgtcaagacacagctgccctactcctattactccctccccttctgcaggccggacaccatcagcagcagcgccgagaacctcggccaggtcctccgtggcgaccgaatctggaactcaccctacttgttcgagatgatggagcctaagctgtgtcagatcacatgcaagattgttctgaccgaacaggaagcaaatgacatcaaggagaaaatcgaggacgagtaccgtgtaaacatgatccttgataaccttcctatggtcgtcccaattacgatgcttgatagaaatgcgcctccatactatcagcaaggtgtgcatgtcggtgtcaagggcatgtatgctgggagtaaagatgtcatgtatttcatctacaaccactactcatttctggtgaagtataacaaggaagcacaaacagatcttgctaggattgtggcctttgaggttaaaccatacagtgttaaacatgaacctgatggtgattggaagggtaatgcaactcgccttaaaacttgtaatccacactcggggcatctagtacggaactctgatgggcctcaacaaatagaggcaaacaaagagataattttcacctatgatgttaactttgaggaaagtgatatcaagtgggcatcacgctgggacacctaccttcgaacacgtgatgatcattggtttatcattgtgaattctctgaccacggtcctcttcctctctgtgatggttgccatgatcatgctccggactctgtaccgtgatatttccaagtacaaccagctagagagccaggaggaagcccaagaggagtctgggtggaagcttctccacggtgatgtgttcaggcctcctgtcaatgctgacctgctgtgcgtgtatgtgggtacaggtgtacagttctttggaatgtttcttgtcaccttgctgatcgccattctggggctcctatcaccttcaaatcgtggagggtttatgacggccatgctcctgctctgggtcttcatgggcctgtttgcagggtactccactgcacgtctttacaagatgtttgggggcctggaatggaagaaggttgccatcaagacggtcttggtattccctggagttgtcttcgtaatattctttgccctgaacatgcttctctggggcgtgaaatcatcgggtgctgtaccattcaccaccatgttcgcactggtttttctgtggctcggaatctctatgccactgatcttcatcggcagctaccttgggtttaagaagcctgccatagaggacccagtaaggacaaacaagataccacggctgataccgcagcagccatggtatatgaacccagccgtctcgatgttgatcggaggtatcctaccctttggtgcagtgttcatggagctcttcttcatcctgacaacaatctggctgcaccagttctactacatctttgggtttctgttcctcgtcttcgtgatcctaatagtgacctgcgctgagatcaccattgtgctttgctatttccaactgtgtaacgaggactacaagtggtggtggagatcctacctgacgcctggctcatcagctctgtacctcttcctgtatgcaacattctatttcttcacgaagctgcagatcacgaaggcagtctccggtgtgctctacttcggctacatgctcattgcctcctacgccttctttgtgctcaccggcaccattggcttttatgcctgcttctggttcaccaggcttatatactcttcggtgaagattgactaggaagctagaatggcatcacttcatatggtttcatgagaaatcagaggtcaaagttgtgaaaagatacatgaaaacttagcatggcttatacacagaagtaagttgtctataggatatatctattatgatctgataattcagttacattaaaagcattggatgtcagtgacttgaggtatgtgcttgtattatcacacagcttacagaattgagatggtacttcagctcgaagaactgaacatatgtttctttagctgaaatgctgaagtctcagtatccatgctgagtaacgagcatctagtgttgtactccctctctttgatacaaaatatagagcagtcagccattgcctcagtgtaaaagataatacttttgactatgttttgtatgagaaaataatatttcaattaaaagactgct

SEQ ID NO: 4072 - DNA, 2494 bp, Sorghum bicolor
gcagcggaaaagcgccatctcattcttcttcctccgtttcgtctccactctccccccgcggccggggagcctcgagcgttcctgccacgagatctctcctgccactcccctcgcctgctcgcaacaccggcatggcgccgtcggcgtgggccgtagccctcgccgcactctgcatcgtcgcgctcgcgccaccggcagcagggttctacctacccggcgtcgcgcccaatgacttcgagaagaaagatccacttcctgtgaaagtcaacaagctgacctcaatcaagacacaacttccatactcttactattctctcccattctgcaagccggataccatagttgacagtgcggaaaatctcggtgaagttcttcgtggagatcgcattgaaaactctccctatacgtttgaaatgagggagcctcagatgtgtcaaatagtctgcaagatatctgttggggagaaagaagcaaagcttctcaaggagaagattgaagatgagtaccgtgttaacatgattcttgacaacctacctttagttgttcctattcaaagagtggatcaagaaggtgcttatttctatcaacatggattccatgttggggccaaaggaaaatattcagggagcaaggatgaaaaatacttcatccacaaccatctatcttttacggtgaaatatcacagggatgagcaaagagatatttccaggattgtggcctttgaagtgaaaccatacagcgttaagcatgaatatgaagggcaatggaatgataagaagacccgcctgacaacgtgtgatcctcatgctcaacgtattattacctcatctgagtctcctcaggaggttgaagttggcaaggatatcatatttacttatgatgtggatttcaaggagagtgacatcaagtgggcatctcggtgggacagctatctattgatgacagatgatcagatccactggttctcaattgtgaattctctcatgattgtcctcttcctttctggaatggttgcgatgatcatgctccgtaccctttaccgggatatctccaagtataaccaacttgagactcaggaagaggcccaggaggagacaggatggaagcttgttcacggtgatgttttcaggcctccatcaaactcagactggctctgtgtttatgtcggcaccggtgtccaattctttggcatgctgcttgtcactatggtatttgcggttcttggcttcctttctccatcgaacaggggtggactgatgacagccatgctcctgctctgggtgttcatggggttgcttgctggctactcttcttcacgtctttacaagttgttcaagggctcagaatggaagaacattgccttgaggacagccttcactttccctggcagtgtgtttgctattttcttcttcttgaatgctcttatctgggggcaaaagtcttcaggtgctgttccattcaccacaatgtttgcccttgtcctcctttggttcggtatctcagtacctttggtttttgttggaagcttccttggcttcaagaaacctaccattgaagatccagtgaagacaaacaagataccaaggcagatccctgagcaggcctggtacatgaacccaatcttctcgattctaattggagggatccttccatttggtgctgtgttcatcgaactcttctttatccttacctccatctggctgcaccagttctactacatctttgggttcctcttccttgtgttcctgattctcatcgtgacatgtgctgagatctcgattgtgctatgttacttccagctctgcagcgaggattacctgtggtggtggaggtcatacctgacatctggttcctctgcactctacctcttcttgtatgcaaccttctatttcttcacaaagcttgagatcaccaagtttgtctcagcagttctgtactttggttacatgctcattgcctcatatgccttctttgccttgaccggcacaatcggattctatgcgtgcttcctgttcacaaggctgatttactcatcggtcaagatcgagtaaggtgaagtgcactcttgcctaattctttgttgccacgaagaaagaaatttctgtggataatgaattctacaggaccgctgagtttagctgcaagtggcctcgttttgagttttccaagctggtagttatgatgaagttgcgattcattaccgtatgattcaggtattatagctagtgcagtattttttttttgttttctcttttgttttgttttttttgggctgtgcctttggaccgtcaggatatatgcttatcaagcgctcgacgctgagcgaattgtatacggatgctgagtaatctatctcttgttcctgtcagaatttatgtacttgttgacgtgcactctgacttactccatgatacggagtatacaattgtagctacaaagtccggctcctgtttcttttgcatcggagtacagacaaatggattatattttttct

SEQ ID NO: 4073 - DNA, 2438 bp, Zea mays
aagcggaaaagcgccatctcattcttcttcctccatcttgtctctacttgccccgcgccggggagccgcgagcgtcgcgccactcccatcgcctgcccacaactccggcatggagccgtcggcgtgggccgtcgccttcgccgcactctgcatcgtcgcgctcgcgccgccggcctcagggttctacctccccggcgtcgcgcccaatgacttcgagaagaaagatccacttcctgtgaaagtcaacaagctgacctcaatcaagacacaacttccctactcctactattctctcccattctgcaagccggataccatagttgacagtgcagaaaatctcggtgaagttcttcgtggagatcgcattgaaaactctccctatacgtttgaaatgagggagcctcagatgtgtcaagtagtctgcaagatatctgttggggagaaagaagcaaagcttctcaaggagaagattgaagatgaataccgtgttaacatgattcttgacaacctacctttagtcgttcctattcaaagagtggatcaagaaggtgcatatttctatcaacatggattccatgttggggccaaaggaaaatattcagggagcaaagatgaaaaatacttcatccacaaccatctatcttttacggtgaaatatcacagggatgagcaaagggatgtttccaggattgtggcctttgaagtgaaaccatacagcgttaagcatgaatatgaagggcaatggaatgataagaagacccgcctgacaacgtgtgaccctcatgctcaacgtatcattacttcgtccgagtctcctcaggaggtcgaagttggcaaggatatcatatttacttacgatgtggatttcaaggagagcgacatcaagtgggcatctcggtgggacagctatctattgatgacagatgatcagatccactggttctctattgtgaattctctcatgattgttctcttcctttctggaatggttgcaatgatcatgcttcgtaccctttaccgggatatctctaagtataaccaacttgagactcaggaagaggcccaggaggagactggatggaagcttgttcacggcgatgttttcaggcctccgtcaaactcagactggctctgtgtttatgttggcaccggtgtgcaattctttggcatgctgcttgtcactatggtatttgcggttcttggcttcctttctccatcgaacaggggtggactgatgacagccatgctcctgctctgggtgttcatggggttgcttgctggctactcttcttcacgtctttacaaactgttcaagggctcagaatggaagaacatcgccttgaggacagccttcactttccctggcagtgtgtttgctatttttttcttcttgaatgctcttatctgggggcaaaagtcctcaggtgctgttccattcaccaccatgtttgctcttgtcctcctttggttcggtatttcagtacctttggtttttgttggaagcttccttggcttcaagaaacctaccattgaagatccagtgaagacaaacaagataccaaggcagatccctgagcaggcctggtacatgaacccaatcttctcgattctaatcggagggatccttccatttggtgctgtcttcatcgaactcttctttatccttacttccatctggctgcaccagttctactacatctttgggttcctcttccttgtgttcctgattctcatcgtgacatgtgctgagatctcgattgtcctatgttacttccagctctgcagcgaagattacctgtggtggtggaggtcgtacttgacttctggttcctctgcactctacctcttcttgtatgcaaccttctacttcttcacaaagcttgagatcaccaagtttgtctcagctgttatgtacttcggttacatgctcattgcctcgtacgccttcttcgccttgaccggcacaatcggattctatgcttgcttcctgttcacaaggctgatttactcatcggtcaagatcgagtaaggtgaagtgcactcttgcctatttctttgttgccacgaagaaagaagtattctatggatagtgaattctacaggactgctgagtttagctgcaagtgggctcgttttgagttttcaaagctggtagttatgatgaagatgcgattcattaccgtatgattccggtattatagctagctcagtatgtttctgtttttcttttgtttttttttgttttcgggctgtgcccgaccgtgaggatatatgcttatcaagagcttgacgctgaaagaattgtatacgggtgctgagtaatctatctcttgttcctctcagaatttatgtacttgttgatgtgcactgtgacgtacatgatatacatttatagctaccggctcggcggctcctgtttccaaaaaaaaaaaaaaaaa

SEQ ID NO: 4074 - DNA, 1923 bp, Ricinus communis
atggcgagagatactctcgcagcgaaatggatctgcttttgtgcattggttttggttgttgttccttgtaattccttttatcttcctggtgtcgcacctgcagatttcctcatgggggatgaactgaaggtgaaagtaaacaaactgacttctacaaaaacacaacttccttactcatactattcgctcccttactgtcatccggagcgcatagttgatagtgcagaaaatcttggggaagttcttcgtggtgaccgcatagaaaactctccttacgtgtttaaaatgagagaaccacaaatgtgcaagattttatgccgtattacacttgatgcaaaaactgcaaaggaattcaaggaaaagatagatgatgagtatcgggtcaacatgatattggacaatcttccactagttttccccattcaaaggtctgatcaggaaaattccatagtgtatcaacatggctttcatgttggtcttagaggacagtatgctggaagcaaagagcaaaagcattttattcacaatcatttagcatttactgtcaaatatcacaaagatgctcagacagattcagccaggattgttggatttgaagtaaaaccattcagtgttaagcatgagttcgaaggtgagtggaagaaggagaatacccgcttaacaacctgtgatccacatgcaaaacgtttggttaccagttcggaaactccccaggaggtggaagataaaaaggacatcatctttacctatgatgttgagttccaggagagtgatgtaaagtgggcctctcggtgggatacttatcttctgatggctgatgatcagattcactggttttcaattgtcaattcgttgatgattgttcttttcctttctgggatggtggctatgatcatgttacggacactttatcgggatatctccaagtacaaccaacttgagacccaagaagaagcccaagaagagactgggtggaaattggtccatggtgatgttttcaggcctccgatgaattctgatttactctgtgtctatgttggaacaggtgttcagttttttggcatgattcttgtcaccatgatatttgctgccctcggtttcctttccccttcaaaccgaggtgggttgatgacagctatgctccttctgtgggtatttatgggcctgtttgctggatactcttcagctcgtctttacaagatgttcaagggaacagaatggaagaaaatcaccctcaaaacagcctgcatgtttcctgcaatagtgtttgccatcttctttgtcttgaatgctcttatatggggagaaaagtcctctggggcagtgccatttggaaccatgtttgcactggtatttttgtggtttggtatctcagtgccacttgtctttgttggtagttacattggtttcaagaagccagccattgaggatccagtgaaaacaaataagatacccaggcagatcccggaacaggcctggtacatgaacccagctttctctatcctcattggaggcattcttccatttggagctgtgtttattgagctcttcttcattcttacctcaatatggttacatcaattctattacatatttggtttcctattcatcgtcttcatcatcctgctggtcacttgtgccgagatcacaatcgtactttgctacttccagctgtgcagtgaggactacctttggtggtggaggtcatacctgacttcagggtcctctgctctgtatctgttcctttatgctgctttttacttcttcacaaagcttgagatcacaaagccagtgtctgggatattgtactttgggtacatgctgattgtctcgtatgcgttctttgtgctgactggtgcaatcggtttttatgcctgtttctggtttaccaggctcatctactcgtcagtgaaaattgactga

SEQ ID NO: 4075 - DNA, 1266 bp, Zea mays; identical to SEQ ID NO: 1567

SEQ ID NO: 4076 - DNA, 1817 bp, Zea mays
gcaagtgttgttgtctcctaaacggggtgcctctcttccagtcttcctcaagttatccacttctctctcgatcgaagtcgaagcacaaaccctactgcccgcccacctcccacgtagtgtgtgtgctactagatcttgtgtccactctcgcccacacacaaacttccacacgaaccaaagattccaatctgaaccaacgttattctgtcgttctccgcctaaccagcaagcagtcgatcgatcgatggagggaagcagaaacagcccggacaggcagtcgtcgggcggcagccctgaggagcgcggaagcggcggtagcggaggccgtggcgccggggagccggtgcggtcgcggtggacgccgaagccggagcagatactgatcctcgagtccatcttcaacagcggcatggtcaacccgcccaaggatgaaaccgtccgcatccgcaagctgctcgagcgcttcggcgccgtcggggacgccaacgtcttctactggttccagaaccgccgctcccgctcgcgccgccgccagcgccagatgcaggccgccgcggcggcggcggcaacagcggcggcggcctcctctgcggccaacagctctcccggggctagcgcaaccgtcggccttccttctggtgctctacaatatcccttggtcatgagcgggagcgggtccgcctgccagtatgagcagcaggcgagctcctcgtcgtcgtcgggaagcactgggggctcgtctcttgggctgttcgccctcggagccggggtgcccagcaccggcggtgggttcttccaggagtcgtgtggcgcttcgtcgccactggcgacagggctgatgatgggggacgtggaccgcagtggcggcagcgacgatctcttcgccatcttccggcagatggggttcgcggcggcgaccccagtcgcctcggcttcggtgacgcctccgagcacaacggcacaccaccagcagtattactcatgtcaatcacctacagggacgatcacggtgttcatcaatggagttccaatggaggttcccagtggtccaatagacatgcgagccattttcggccaggacgtgctgctcgtccattccaccggggccctcctcccagtcgacgactatggaattctaacgcagagcttgcagacgggtgaaagctatttcttggtagcaaggccaacttaaaactgcccgcacctagttagattgtagcgcagtctctctgccggccggtctctactggatattcagatgggacgcagttcatgatcaatcaaggtgggtccttttgcacgcaaatgatattgtccatcattcatatacagtccttcgagaagaaaagttagctaccaagaacaatatatgtatattgcacctcaagcaagtacgtacacatatgtccttgcaacataagagagcgtacagtacatgggcggttcagattggattatgagaattacagtgtatgcatgggtgttttctctcacgcatcattttctttacaaggatatgtgcatgtgaatgctgaatacatgcatggaatctccttgacagtcgagctacatatttattttagctagacagttgcacctttgaaacgatttgatttataagtatgtaatgttgtacgtctatatatgtcgactggaccgtgtttggaatgtctgtccaccaatttagaagagagagtactccttttggatgtttatatatatgtcgaccgtgttagacttcatattttgtatactttgtatttcaagaagagagagtactccttttggatgtttattaattaaaaaaaaaaaaaaaa

SEQ ID NO: 4077 - DNA, 972 bp, Sorghum bicolor
atggaggggagcagcaatagcccggacaggcagtcgtcgggcggcagcccagaggagcgcggaagcggtggtagcggaggccggggcggcaccggggagccggtgcggtcgcggtggacgcccaagccggagcagatactgatcctcgagtccatcttcaacagcggcatggtcaacccgcccaaggatgaaaccgtccgcatccgcaagctgctcgagcgcttcggcgccgtcggggacgccaacgtcttctactggttccagaaccgccgctcccgctcgcgccgccgccagcgccagatgcaggccgccgccgccgcggccgccgctgcggcagcggccaacagcgctcccgcggctagcgccaccgccggcggccttccttctggcgctctacaatatcccttggccatgggcggcggcaccgcctgccagtatgagcagcaggcgagctcctcctcgtcgtcggggagcactactgggggctcgtctcttggccagttcgcgctcggagccggggtgcccggcaccggcggcggtgggtacttccaggcgtcgtgtggcgcttcgtcgccactggcgactgggctgatgggggacgtggacagcagcagtggcggcagcgacgatctcttcgccatctccaggcagatggggttcgcggcgacgagccccgtcgcctcggcctcggtggcgccgccgagcaccaccgcacaccagcaaccgtattactcatgccaatcgcctgcagcgacgatcacggtgttcatcaatggagtcccaatggaggttcccaggggtccaatagacttgcgagccatgttcggccaggacgtgatgctcgtccattccaccggggccctcctcccagtcaacgactatggaattctaacgcagagcttgcagatgggtgaaagctatttcttggtaatctcccatatcgcctctctcatctactccattccattctaa

SEQ ID NO: 4078 - DNA, 1602 bp, Oryza sativa Japonica Group
aaccaacgctcgatcttttacttaccctatctcccgacgatcgatcgatcgatcgatggaggggagcagtaatagcccggataggcagtcgtcgggcggcagcccgccggaggagcgcggcggcgggggaagcggtggaggaggagggcggagcgccgccggcgagccggtgcggtcgcggtggacgcccaagccggagcagatactgatcctggagtccatcttcaacagcggcatggtcaacccgcccaaggacgagaccgtccgcatccgcaagctgctcgagaggttcggcgccgtcggcgacgccaacgtcttctactggttccagaaccgccgctcgcgctcgcgccgccgccagcgccagatgcaggcggccgccgccgccgccgcagcggcggcctcttcctcttccccatccgccaacacctctcccgcagccgcgagcgccgccaccgtgcaggtgggcctcccgcccggcgccgtcgtccacaccatggccatgggtgggagcgcgtgccagtacgagcagcaggcgagctcgtcgtcgtcgtccggcagcacgggaggttcgtcgctggggctgttcgcgcacggcgcgggggcctccggcgccggcgggtacctgcaggcgtcgtgcggcgcgtccgcgtcggcgtcgtcggcgctggcgcccgggctgatgggggatgtggtggacagcgggggaagcgacgatctcttcgccatctcgaggcagatggggtttgtggggagccctcgctgctcgccggccagctcgccggcgacgccgagctccgcggccaccgccgcgcagcagcagttctactcatgccaattacctgcagcgacgatcacggtgttcatcaacggagtcccaatggagatgccgaggggtccaatagacttgcgagccatgttcggccaggatgtgatgctcgtccactctactggggccctcctcccagtcaacgactatggaatcctaatgcagagcctccaaatcggagagagctactttctggtcgctaggccaccttaaaaacgagttctcgatctatccttgcagtagatagtcagatatatatctctactcgatactcattggatcagatgcatgagccggccggggtgcagctagttctcagttaatcatcaatcaagaatgctgtcttggattcaagaccttggagtatgtctaaatcgatcaatcgtctatcgagaacaagactatatatattagctaggtacgagaagcaaattaatgcatgcattgcagcatatcgatcggcaaaagtacaactacgtacttatatatatgccccttaattaaaaacctatgaaagcgtgggcggtcgagtttgttgtccttagaatacagattacaatatggtcgcgtctcttctcatcattttcacaattccattacaatatgcatgtatgcatgcctgcccttggcagtcgagctatatatattctttaatttgtgctagctatagatgcacgtttgtattgtttttttttaccgtgtgatgtaatgctatatgtgtcagccaaacgcgcctggaatgttggtgcttgattcaaggccggttggaattt

SEQ ID NO: 4079 - DNA, 1292 bp, Zea mays; identical to SEQ ID NO: 1569

SEQ ID NO: 4080 - DNA, 1234 bp, Zea mays
cttgcggtagcgactagcgatcgacccaacttcccacccgcccccgcgtccgcgagctcgccgaagctaaggccgaagggtacccgccctcggcgctatgtcgctgtcgccggcggacagcgcggcgtactggctgcggtggcaggtcctcgtctacggcgcgctcatcgctttccccgcggcggccgcggcggcgctactgccgcggctgcggagggcggcgccgcctctgcgcgcggccgacctctgggtctcctgctgggcgcgcctccacccgggttggctcctcgcctaccgcgccttcgcgttcgcagcggccgtcgcgctcctggcgcgcctcctcgtcgggcacggcctcaccgtcttctacttctacacccagtggacatttctattagtcaccatatattttgcgtttgccacagctatatcagcccatggctgctgggtttactcaaggaaaagtttgaggaaatccgatgaatcccatggatttcttaatgctgatgtcgaaaatcgtgatgtttccaattccatttctggagagaggaaaaaagatgagacaaaaatgatggtgagctattatgaacaaatagtgaatgagagaagagcagggttctggggctggtgcatgcaaatcatatatcagactagcgcaggtgcaacaatgttgaccgatgtcacattttgggggcttcttgtgccatttttctaccgtgacaagtttgggttagcgttggtcactgatggcatgcactccctaaatgctgtttttctacttatagacacagttctcaacaatatgcccttcccctggtaccgaatggctttctttgttttctggagctgcgcctatgtaacattccagtgggttcttcatgcttgtggaagcttatcctggtggccatacccgtttctggacctttcatcatctggagctcctctatggtacctcggcatggcaatcgctcatatcccctgcttctttttgtattggttggtcgtcaaggcgaagcacacttatttcccacggatgtttccacatgcttatgttaggacagtatagatctaaatatcagtagcatactatttcaacacctgcttggctcaagtgtacacccgtatagtctcattgaattcgccgcacctttgagatgggcctgagctctgaaaacaagccggtaccggcggcttgatcaatgaaatgcagaggttcacaaaaaaaaaaaaaaaa

SEQ ID NO: 4081 - DNA, 3416 bp, Oryza sativa Japonica Group
atgctaacctttccctccaatctccgtctccgcgtctacttccgcaacttcaccgcctcgctcgccgagtcgcggtcggactcgcagtcgcagcgtcgcacaccgtcaacaacccaaccccaactaccccaaaattcccccgcgccgcacctccattgccgctacgcgacgcgaggctcaagcaaaggtcaaccgcgcgtcgccgggggggtgatgtcgtcgtcggcggcggcggaggacggcgaggcggcgtactggctgcggtggcaggtgttcgtctgcggcgccctcatcgtgctgccgacggccgccgcggcggcgctgctcccgcggctgcgcagggcggccgcgcccctccgcgggaccgacctgtgggtcccctgctgggcgcgtctccaccccggctggctcctcggctaccgcgccttcgccctcgccgccgccgtcgccctcctcgtccgcctcctcgtcggccatggcatcgacgtcttcttcttctacacccagtacggcctcctccgtcctcctcctccactatctgagcaagcttgattgcctcgaataatctaagacaaacatcgtacacatcgtccatacaagcatacgcgagcgtctagctgttctataatgtggtgtagaaattagcgtttaccagcgagaattgttcggagtgatttgacatagctggatagtagcattcgaagtgatccacacattgatccattgacttttggctgtttacagtatctctgtactgctatgtagatttggagctttctgcttttagtttggccacactgaactaattgccccgtgtcagatagatggatctggcaaatgttttaaatattctggtagttgttgctttagaaggcatgcagctgatcagcccccttgtagttgtttgcagtcttgactcttgattttattatttcctcccttttccttagatgaacctaactgctcttttgactttaattaattctctcctgaattatctttgcaggtggacctttttattagtcaccatatattttgcggtatgttctttgttcccaagttgtctgtccaccttttatctttttgaatctgcatatgtgctattttatcgtttctttcttttctagcttgcctatcatttgatgccttcactaattgagtgtgttattcttagtttgcaactgctatatcagctcacggatgttgggtttactcaaagaaaaacttgaagaaagctgatgaatcccatgaatttcttagtgacgatgtggaaaatcgtgagttttccacttcttctggcgagatgaaaagggatgaggagaagataacaaactatcatgaacaaatagcaaatgagaaaagagctggattatggggacgttgcatgcaaatcatttaccaggtttgaactcacctgtcattctagaattgtaattatggacatgctatgtgctttatttacgatactcaatactgtcaaatctaaatccaaatgatactgctttaaggaatatagatacaatactaacacttatgttttcttactacgtcatattgatattcagtgcatgtgctaagttagagcaagttcatcagctgattgcttggggctatgcaactcaaactactaccatagctacattttatgttctccatgttatttagcactcaacacaaactagcatcaatttctttggcctagtaaaaaaataatctcctcacctgtaccacggatactgagttcatgcctgctatcaaattgtgtgattctatcgccaactaattgtaatctattttacagactagtgcaggtgcaacaatgctgactgatatcacattttggggactacttgtgccattcttttaccgtgataagtttggactttccttggtatgtaaaaatttcaggatgtgtatagcctcagctgttcatccccccaaccaaatgcctatcgttggcaaatcaattctattcaataaaagaaataactcctaccttggcttttctcccctattatattctagtggcatataaacaattacttgttatactgagctgtaagaatcatagtgtaaatccaaatctagtatgtgctaaacatttaagatgatagtagtagtaagcataggcaatctaacagtaataaacagcacaggtgtttgtagctggtcaaataaagaattggtgatgtaatcttatttttggctgatcttgttctttaaaatttcatgcagatcactgatggcatgcattctcttaatgctgttcttttactgatagacacatttctcaacaatatggtaagacaaaatcactctgttctttcttttaccttggtgtgattattttacacctggttgctttcactcttttcagcccttcccctggtaccgcctggctttctttgtattttggagctgctcctatgtaaccttccaatgggtccttcatgcttgtggagctatatcctggtaggttctcccctgccgtttacactaaagcaatgtaatggaatgtcttggtccccttcattgtgccattttattaagtatacactaagaaaaatacaaaagttagagcgtcatttatgtattcaaatcctatttgatactttactttaagaaaagggggaactcacactataatattcgtttacaaaaaatacaacaaaaagtggagaggtttttatagaatgctgcaatgagctgtacatgagcatgcccatatgacatagtttatccaagagatatggagtatggacatgtgcattctgaacatgtgaccatgtggcaattaacccaggatatctatagactgcaccgaccctgcctacttctcagcgaaatttattgcatctcttgggacattttgtacatatatgaaccaccttctgatcaagtttaggggtaatttttattaaagagatgaaagctgttgtgctctaattggtaaagttgagtcataacaaaaagaacccttatatttctattctagcatactgatatgtgcatattgagtgcgagtttgaaacaacggctcatgtgttgtttttttggggaatacttacttgcgtatctttgtattaagatttagtgccgctcgtgtgttgttgcacgccacaagaaaatgttttttgagtttacctctaaacgttgtaatcatgtttccatattcttcaggtggccatacccatttcttgacctttcatcgtcaggggctcctctatggtatgttttctcatctgttcatccataccatccatggaactttgctgtcctgacaacaccattaatttttctgcaggtacctcgccatggccattgttcatatcccttgcttctttctgtattggtcgattgtcaaggcaaagcaaacttacttccccagattgtttccacatgcttatgtgagaaat

SEQ ID NO: 4082 - DNA, 1253 bp, Hordeum vulgare subsp. vulgare
ggcgaggccgcgttaactccgccgcctcctcctccagggcgactcagctagggttctcttctccgccggcctcgcggggggacgggggcgcgatgccgacgccggcggacggcgcggagtactggctgcggtggcaggtgttcgtgtgcggcgcgctcatcgccgtgcccacggcgctggcggcggcgctgctgccgcggctgcggaggacggcggcgccgctccgcgccaccgacctctggctcccctgctggccccggctccacccggcctggctcctcggctaccgcgccttcgcgctcgccgccgccgccgcgctcctcgtccgcgacatcatcccccacggccccagggtcttcttcttctacacccagtggacctttttattagtcaccatatattttgcggttgcgactgctatatcagcccatggatgttggtcatactcaaagagaagcttgagaaaagctgatgaatatggtgatgttgaaaatcgtgacctctcagcttctatttctggaggtaggaaaaatggtgagatggacaagatggcaagctattatgaacaattagcaaatgagaaaggagctgctttctggggacgttgtatgcaaatcatctaccaggctagtgcaggagcaacaatgttgactgatgtcacattttggggactccttgtgccattcttttaccgtgataagtttgggcttgccatggtcactgatggcatgcactctgttaatcttgttcttctactgatagacacacttctcaacaatatgcctttcccctggtaccggatcgcattcttcgtattttggagttgctcctatgtaaccttccagtgggtcattcatgcttctggagctttatcctggtggccttacccgtttctcgaccttgcatcgcctggggctccactatggtacctcgccatggccgtcgctcacgtcccgtgcttctctgtgtattggctggctgtcaaggcgaagcgtgcttatttcccaaggatgttcccacatacttacgtgaggacaagttagagcctccatctagtcatggatcatactcccaatggggtgtatgtataactatagatagccattatttgtgcacttgatagctccaagtgccttcttgcatagtcccatagatcaacaatcccttttaaatgtgactggattctgaggcacatgggattcatactctgatcattggaatgaaatatagaggagattgttaacgtggcctcc

SEQ ID NO: 4083 - DNA, 1197 bp, Hordeum vulgare subsp. vulgare
gagctagggttctcttctccgccggcctcgcggggggacgggggcgcgatgccgacgccggcggacggcgcggagtactggctgcggtggcaggtgttcgtgtgcggcgcgctcatcgccgtgcccacggcgctggcggcggcgctgctgccgcggctgcggaggacggcggcgccgctccgcgccaccgacctctggctcccctgctggccccggctccacccggcctggctcctcggctaccgcgccttcgcgctcgccgccgccgccgcgctcctcgtccgcgacatcatcccccacggccccagggtcttcttcttctacacccagtggacctttttattagtcaccatatattttgcggttgcgactgctatatcagcccatggatgttggtcatactcaaagagaagcttgagaaaagctgatgaatatggtgatgttgaaaatcgtgacctctcagcttctatttctggaggtaggaaaaatggtgagatggacaagatggcaagctattatgaacaattagcaaatgagaaaggagctgctttctggggacgttgtatgcaaatcatctaccaggctagtgcaggagcaacaatgttgactgatgtcacattttggggactccttgtgccattcttttaccgtgataagtttgggcttgccatggtcactgatggcatgcactctgttaatcttgttcttctactgatagacacacttctcaacaatatgcctttcccctggtaccggatcgcattcttcgtattttggagttgctcctatgtaaccttccagtgggtcattcatgcttctggagctttatcctggtggccttacccgtttctcgaccttgcatcgcctggggctccactatggtacctcgccatggccgtcgctcacgtcccgtgcttctctgtgtattggctggctgtcaaggcgaagcgtgcttatttcccaaggatgttcccacatacttacgtgaggacaagttagagcctccatctagtcatggatcatactcccaatggggtgtatgtataactatagatagccattatttgtgcacttgatagctccaagtgccttcttgtatagtcccatagatcaacaatcccttttaaatgtgactggattctgaggcacatgggattcatactctgatcattggaatgaaatatagaggagattgtt

SEQ ID NO: 4084 - DNA, 1399 bp, Sorghum bicolor
agcaacgtcctccgagtagcagtagtacgtgggaggagtggagacgagagtggagggcgatgggcggagaccggagagcggcggcggcgctccagcgacactggtgcccgtcatggagcgtgagcgagcggtggcgggcgcacgccgggatggtcctcgtcatgctcgcctacagcggctaccacgtcctcaccaagtccgtcctcaacgtcggcatgaaccaggtcgtcttctgcgtctaccgcgacctcctcgccttcgctgtcctcgcccccgtcgccttcctccgcgagagaagggtgaggcctccggtgacacctcagctcctcgcatccttcgctcttcttggcttcactgggctgtatgggaacccgctcctgttcctcgtcggtctccggtacacgaacgcttcctacgccgcggctttccagccctccataccagtactcacatttctcttggctgccattgtcggtgttgaagccattaacatcttcaccaaagacggcgtcctcaaagtcatcggcacggtcgtatgcgtctccggcgccattctgatggctctgtaccgaggttcatccttgattggccttactagaagcatgcccaacgcatgggcgagcacttcctatcctgctgcccccaactggttggcatcagccgtgctcgagcacggtgtagaaacatggcagcttggtgtcctgtgccttgtaggaaactgcctcttggtggctgtttatctagtcatacaggctccagtgatgaaaaaatatcctgcaagcttatccgtgacagcttattcctatttttttgctacaatctttatggtgctaactggagtatctgcaactaatggactacacgagtgggcgctgacgaaaactgaggtcatagctgttctgtatgctggaattgttgcgtcttgtttgagctactcaatcatgacatgggcaaacaaaattcttggaccttctctagttgccctctacaatccgctccaaccagccttttccactgtcctctcaactatttttcttggtgacccagtttacatcggaagcattattgggggagtttccataattgttggtctatatctggttatctgggctcgctacaatgaagagcaacgagcacctatggatggttatttggaccctcttattgtggataatccaagaatccccaagacagaagaaatctccttcatatagatccttaaatgatcagcgaattaaatgggttgtgctcggtgacctcgaactaccgtcgacactacccttgtaacaaaactactctttctgcttaatgaaaaacatgctttggcatgatgtcttatgtttgttaaactttacatatatattctaacaaagaagtggtcaaaaattcacattggaga

SEQ ID NO: 4085 - DNA, 2467 bp, Zea mays
atggggcggtcataccttgaaggcgggcgggacgcgggggcggaccttgggtacccgctggtggccgtgtgcatcgacaaggacaagaacagccagaacgcgctcaagtgggccatcgactcgctggtacagaaggggcagaccatcgtccttgtccacgtcaacaccaagggcacctccggcggcgtggaggacgcggccgggttcaagcagccgacggacccgcacatgaaggacctcttcgtcccgttccgatgcttctgcacccgcaaagacgtacacgacgatcggaggatacatgtcgtcgatcgtgcaccgatggatttgatcaggctgtgacatatgtctgttgcattgcagatcaattgcaaggacgtggtgctggacgagcacgacgtggccaagtccatcatcgagttctcggcgcaggcggccgtggagaagctcgtcctcggcgccacgacgaggggcggcttcgtccggttcaaggcggacatcccgaccaccatctccaagggcgccccagacttctgctcggtgtacatcgtcaacaaggggaaggtctcgtcgcagcgcaactccacccgcgccgcgccgcgggtgtcgccgctccggtcgcagatccagtcgtcgcagattgccgcaacgctcaagcccgagccgccgcagtcgcaccggtggtcctcgtcgtcgagaggccacgagcacggcgagacgccgcgggtggacaacttccgctcgccgttcgcgcgcgggggccccgcgaacacgcgcaagtcgtacgccgacctcagccacatgtccatgccggactcggccgacatctcgtttgtcagcagcaccggccgccggagcgtcgaccaccacccggcgatcccgccgcggatgtccaacggctccgtggacagctacgaccacagcttcgagatgtcacgcacgcccagcaagtggggcggcgactccttcggcggcatggaccacaccaccttctcgcagagcagcagctcttccttctgctccctcggcatggtgagtactctgtactccctcggtcgactcagatctccattcctagcaagcatcttgaattcttgacgagggaagctctctgtttccctaatgataacagcaggacgacgtggaggcggagatgaagaggcttcgcctggagctcaagcagacaatggacatgtacagcacggcctgcaaggaggcgctgacggcgaaacagaaggccatggagctgcagcggtggaagatggaggaggagcagaagacgcaagactcgcggataacggaggactccgcgatggcgatgatcgagcgggagaaggctcgggcgaaggcggccatggaggcggcggaggcgtcgcagcggatcgcggagatggaggtccagaagcggatcagcgcggagaagaagctgctcaaggaggccgaggagcgcaagaaccgcggcggcagcggcatgtcccacgaggcccggtaccggcgctacagcatcgaggagatcgagcaggcgacggacaacttcaacgacgcgcgcaaggtgggcgagggcgggtacggccccgtgtacaagggcttcctcgaccacacgcaggtggccatcaaggtgctccggcccgacgcggcgcagggccggtcgcagttccagcaggaggtggaggtgctgagctgcatccggcaccccaacatggtgctcctcctcggcgcgtgcccggagtacggctgcctcgtgtacgaatacatggccagcggcagcctggacgactgcctgttccggcgctccggcggcgccggcgggcccgtcatcccctggcagcaccggttccgcatctgcgccgagatcgcgacggggctgctgttcctgcaccagaccaagcccgagccgctggtgcaccgggacctcaagccggggaacatcctgctggaccgcaactacgtgagcaagatcagcgacgtcgggctggcgcggctcgtgccgccgtccgtcgccgacaccgtgacgcagtaccggatgacgtccaccgcggggaccttctgctacatcgacccggagtaccagcagacgggcatgctcggcgtcaagtccgacgtctactccttcggcgtcatgctgctgcagatcatcacggcgaagccgcccatggggctgtcgcaccacgtcggacgcgccctggagcgcggcgagctgcaggacatgcttgaccccgccgtgcccgactggcccctggaggaggcgcagtgcctcgccgagatggcgctccggtgctgcgagctgcgccgcaaggaccgcccggacctcggcgctgtcgtgctcccggaactcaaccggctgcgcgcgctcggcgaggacaacatgcagtactgcggcgccatcatcaggggtggcggcggcggcggcatgcacagctcgtcgccgttccacagcaacatctcacggtcacacgccgtaagcttcctc

SEQ ID NO: 4086 - DNA, 2764 bp, Oryza sativa Japonica Group
atggccttccctccccatttcaatctttcagtggatgaacaatcaaccagcagagtttttctgaagacattggtagcagagctgtgcgcaggaaggaaaatggcatggaactagtacaggatagcaaaaagcttcgagcactagagcaacgaggaagggggaactaaattggttaatcggttagccctggcaatgggcaaggacggcggcgaccccggcggcggcgggtacccgctggtggcggtgtgcatcgacaaggacaagaacagccagaacgccctcaagtacgccacggagtcgctcgcccacaagggccagaccatcgtgctcgtccacgtccacaccaagggctcctcaggtggcgtggaggacgcggccgggtacaaacagccgtcggacccgcagatgaaggacctgttcctcccgttccgctgcttctgcacgcggaaagacatccactgcaaggacgtggtgctggacgaccacgacgtgtccaaggcgatcgtcgagttcgccgcgcacgccgccatcgagaagctcgtcgtcggcgccaccgccaggggcggcttcgtcagattcaaggcggagatctcgagcagcatctccaagacggcgccggacttcagcaccgtgtacgtcgtctccaaaggcggcaaggtgacgtcggtgcggcaggccgtccgccaggcgccggccgtctcgccgctccgcacaatgatccagggccccaagcccgataacgtgtccacgcagaaatggacgccgccgcctcctccgtccacgacgagacctgacatcgccgggacaccgaagatacaggacaacttcattatgtcgccgttcgcgaggggggcgaacacgtcggtgaggaaggcgttcccggactactcgatgccggagtcgtcggacatctccttcatcagctccggccctcgccggagcttggacctgtacccgccgcggctgtcgtccggttcggacgcccacgaccaccacagcttcgaggcgacgcggccgcccagcatgtggggcggcgactccttcggcagcgactcccagtccagcaactcctccttcgcttcctcccttcccatggaggacatggaggccgagatgaagcggctgcggcttgagctcaagcagaccatggacatgtacagcaccgcgtgcaaggaggcgctcacggctaaacagaaggcgatggagctgcagcgctggaagacggatgaggagcagcggtcgcacgagacgcggctgacggaggagtcggccatggcgctgatcgagcaggagaaggcgaaggcgagggcggccatcgaggcggcggaggcgtcgcagcggctggcggagatggaggcgcagaagcggatcagcgcggagatgaaggcgctcaaggagaccgaggagcgtctcaagtccatgggcggcggcggctcgcgcggcgcggtccggtaccgcaagtacaccatcgaggagatcgagctcgccaccgagcacttcgccgacggccgcaagatcggcgagggcggctatggcccggtgtacaagggccacctggaccacacgccggtggccatcaaggtgctccgccccgacgccgcccaggggaggtcgcagttcaaccaggaggtggaggtgctcagctgcatccgccaccccaacatggtgctcctcctcggcgcgtgcccggagtacggctgcctcgtctacgagtacatggccaacggcagcctcgacgactgcctgttccggcgcggcggcggcccggtcatcccgtggcagcaccgcttccgcatcgccgccgagatcgccaccggcttgctcttcctccaccagaccaagcccgagccgctcgtccaccgcgacctcaagccgggcaacatcctcctcgaccgcaactacgtcagcaagatcagcgacgtcggcctcgcccgcctcgtcccgccctccgtcgccgacagcgtcacgcagtgccacatgacgtcggcggcggggaccttctgctacatcgacccggagtaccagcagacgggcatgctcggcgtcaagtcggacgtctactccctcggcgtcatgctgctccagatcgtcaccgcgaagccgcccatggggctcacccaccacgtcgcgcgcgcgctcgaccacggcaccatcgtcgacatgctcgacccggccgtccacgactggcccgtcgacgaggcgcgctgcttcgccgagatatccatccgctgctgcgagctccgccggaaggaccgccccgacctcgccaccgtcgtgctcccggagctcaaccgcctccgcgccctcggcgaggacaacatgcagctctgcaacaccatgagcggcggcggccggagcagcatgcacagctcgccctacaacagcaactcctccatgcatcaacctcatcgacaaaccgatatggcgattgagcacagcgtagggaggtcgtcgtacgacgcggacacgagccagcaagccatgcagggacgaaggctcaactacaactaaattaaagctgacctgagttttgcactacgactgcaataggcgttactgcaaggctcacttaagcatgatttttatccaatgcttctcctgattaatctgagtaggaagctactgtttgttaatgcagagacagagagccatgttcatgcctacatgttggtgtggttgtaaactagttgtcgatcgtttcttgatcctcctgttgtttgtaaatgacctgacattttaaaactaatcaaaatgctgacagttc

SEQ ID NO: 4087 - DNA, 2340 bp, Zea mays
aactccaccgcccctacctgacctgacctgagataagcaaacgcacacctgcggtgcgggctgcggctccgctcatcgctgccagccagtccaggtcactgcctccctcgttccacaccatgccagcggccactctcgccgtgcgggtggccgccatcctgctcctcctcgcccggggcggatccgggtcggcgcccggggagttcgtgctcagtggcttcgcgagcggcaacgtcacgaccagcggcgcggccgtcgtcacctcctccggcatcctgcagctcaccaacgcgaccaacgaggtgttcgggcacggcttctaccccgtgccgttccgcttcaaggacgcctcctccacgccgcgctccttctccaccaccttcgtgttcgccatggtgccgcggcacgacgacgcgcacggccacgggatcgccttcgcgctggcgccgtcgccgaccgtgcccggcgcggtggccgggaagaacctcggcctgttcaacacgtccgacgacacggggaaggccaggagcggggtcgtcgccgtcgagctcgacacggccaaggacgaggagtttagcgacatcaacgacaaccacgtcggtatcgacgtcaacagcctggtgtccgtgagctcagcgccggcggcgtacgtcgacgccggcagcctagtcaacatcagcctggtcagcggggagcccctacaggcgtgggtcgagtacgacggcgcgagcatgcgcctggaggtgacggtggcgccggcgcgcaagcccaggccggccgtcccgctcgtgtcttccgtcgtcaacctctcgtcggccgtatccgacgacacgtacgtcgggttcacggcggcgaacggcgcggcctccacctctcactacgttcttggctggagtttccgcctaggcgacggacgcgcgatggacctcgacgcctcgaagctgccgccggtcccatcgtccaagaagaagacgtcgcggctaaacttggtcacgctgtccctcgttgtcgtcgtggcactcctcttagcgtcggtggcagtcgcagctctcgtggtcaggcaccggcggttcgccgaggagcaagaggactgggagatacagtacgggcctcaccggatcagctacaaggacctgcacgcggccacgagggggttccgcgacgccatcggcgaaggcggcttcggccgcgtgtaccacggcgtgctacagcggccggtgaacgccgaggttgccgtcaagaaggtgtcccacgactcccggcaggggctacgcgagttcgtgtccgagatcgcgagcatgagccggctgcgccaccgcaacctggtgcagctcctcgggtactgccggcggcggggcgagctggtactcgtctacgactacatggtcaacggcagcctcgacaggcacctgttcgacgccggcaagccggcgctgagctgggagcagcgcggcaagatcgtccgcgacgtcgccgctgggctgctgtacctgcacgaggggtgggagcaggtggtggtgcaccgcgacatcaagtccgccaacgtgctcctcgacgccgacatgaacggtaagctcagcgacttcggcctcgcgcggctgtacgaccacggcagcaacccgcagacgacgcacgtcatcgggacgctggggtacctcgcgccggagatgagcaagacggggaaggccaccacaagcaccgacgtgttcgcgttcggcgccttcctgctcgaggtggcgtgcgggcggcggcccatggagcgcgacgacgaccttgatttgcccgggctcgtcgacctcgtcctcgagtgctggaaggccgggaggatcgtggaagccagggacaaaaggatcggcaagtgcgacgaggccgacgtcgagctggtgctcaaactcggcctgctctgttcgcaccctgacccccggtgccggccgagcatgaggcaggcggtgcagatgctggaaggcgcagcgccggtgccagagacaccgcccaaagatctagccagcaacagcaggttgttctacggatacagcgagtctttcgacgagttcgccaccatgttcccggcgacgtcggaggtcaccagcgtcaccacgcagccgtcttcctcacactccaccggcgaggggcagcaggtctcctccgaacaaatcaccaacgtatagtcatgtgttttacgatggttgggttaggaagcaaacagtgatcataggtttaggtgttgtgtggtattttcttcaagtgaatataggatatggtcagccattttgtagggatgaccacaaaaacaaagttagataaagctccaacagattgaactgaaaaaaaaaaaaaaaa

SEQ ID NO: 4088 - DNA, 2097 bp, Sorghum bicolor
atgccagcggctgctcttgctgtgcgggtggccgtcctgctcctcgtcgcccgaggcggatcggcggccggcgcagccgccgtagagttcgtgctcaccggcttcgcgcatgacaacgtcacgaccagcggcgccgccgtcgtcacctcctccggcctcctgcagctcaccaacgagaccaacgaggtcttcgggcacggcttctatcccgtgccactccgcttcagggacgacgcctcctcctcctcctccacgggcgcgccgcggccgcagtccttctccttctccaccaccttcgtgttcgccatggtgccgcggcacgacgacgcgcacggccacgggatcgccttcgcgctggcgccgtcgccgaccgtgcccggcgcggtggccgggaagaacctcggcctcttcaacacgtccaacgacacggggaggatgaggagcggggtcgtcgccgtcgagctcgacacggcgagggacgaggagtttaacgacatcaacgacaaccacgtcggcatcgacgtcaacagcctggtgtccgtgggctcagcgccggcggcgtacgtcgacgtcggcgtcggcggcagcctcgtcaacgtcagcgtcaacctggtcagcggggagcccctgcaggcgtgggtcgagtacgacggcgcgagcatgcgcctggaggtgacggtggcgccggcgcgcaagcccaggccgtccgtcccgctcgtgtcttccatcgtcaacctctcgtcggccgtggccgacgacacgtacgtcgggttcaccgcggcgaacggcgcggcttcgagctctcactacgttcttggctggagtttccgcctaggcggcggccgcgcaccggacctcgacctctcgaagctcccgtcggtcccgtcgtcaaggtcgtccaagaagacgacgtcgcagctactggtggtcacgctgtccctggctgttgtcgtggcactcctcctagcgtcggtggtagtcgcggtggtcgtcgtcaggcgccggcggttcgccgaggaggaagaggactgggagatagagtacgggcctcaccggatcaggtacaaggacctgcacgcggcgaccgggggtttccgcgacgtcatcggcgaaggcggcttcggccgcgtctaccacggcgtgctcctgcggccggcggctgccgaggtcgccgtcaagaaggtgtcccacgactcccggcaggggctgcgcgagttcgtgtccgagatcgcgagcatgagccggctgcgccaccgcaacctggtgcagctcctaggctactgccggcgccagggcgagctgatactcgtctacgactacatggtcaacggcagcctcgacaggcgtctgttcgacgccggcaagccggtgctgagctgggagcagcgcggcaagatagtccgggacgtggcagccgggctgctgtacctgcacgaggggtgggagcaggtggtggtgcaccgcgacatcaagtctgccaacgtgctcctcgacgccgacatgaacggcaagctcagcgacttcggcctcgcgcggctctacgaccacggcagcaacccgcagacgacgcacgtcatcgggacgctggggtatctcgcgccggagatgagcaagacgggcaaggccaccacgagcaccgacgtgttcgcgttcggcgccttccttctcgaggtggcgtgcggccggcggcccatgcagcgcaacgacgacgtcgactcgccggggctcgtcgacctcgtcctcgagtgctggaaggccgggaggatcgtggaagccagggacccaaagatcggcaagtgcgacgaggccgacgtcgagctggtgctcaagctcggcctgctctgctcgcaccctgacccccggtgccggccgagcatgaggcaggcggtgcagatcctcgaaggcgccgcgccggtgccggagacgccgcccaaagatttagccaacaacaacaggttgttctacggatacagcgagtctttcgatgagttcgccaccatattcccagcgacgtcggaggtcaccagcgtcaccacgcagccgtcttcctcacactccaccggcgaggagcagcaggtctcctccggctccggctga

SEQ ID NO: 4089 - DNA, 1879 bp, Sorghum bicolor
aaaccatatatttaaataaaaaataaaataaaggctcgacgcctcgacgtcgtcgtcacctctctcgccgtccaccagtcacggcgagcgggcggcgtcggccgtcagcggcggccgggggttcaccaccatgcctgaccccaccgccaaacccccctcgccacggccccgccgccgccgcaggctctgcggcctctgcctcggcaccgcgctcctcgcgctcctcgtctccgcgctcgtccacgccgtcgcctcgccgccgcgtcgtcccgcccccggcccggcctccgcgcgcttctccgtcgtcatagacggaggcagcacgggcacgcgggcccacgtcttcgccacggggcacgacggccgcccggatctggcgcgctccaccgtgatgcgcgtctcaccgggcctctcgtccttcgccgccgacccggcgcgggccggggagtctctgaagccgctgatagatttcgcgagggatgagattgtcggctcgggaggcgccgctcgggaggcggaggtgcggctcatggctaccgcagggctgcgcctgctcgaggagcgcgcccaggaggcgatcttagcgtcctgcagggacgtactacgagcctctgggttccgattcgaggacgcgtgggccaaagtgatcccaggctcggatgaaggtatctatgcttgggttgcggcaaattatgctcttggcagacttggaggggatcctaacaaaaccgttggaataattgaacttgggggcgcttcagctcagcttacctttgtttctgatgaagtacttccacccgaactgtcatataattatacttttggtgaaagaacatacactctctataccaacagctttttaaactttggtcaaaatgcagctcaagactcatttcatgaaatgctgaggtcaagaggctcttccaaaaatggtacacttgctgatccttgtgctcccagaggatattcacgcaatgaagaagtgatggtgaggatgagcagcacttcaaggtcaacattagagaatcaatatgttgataatgggactggaaactttactgagtgcatatcttcttcgctgctgttactgcaaaaaggaaaggaaaagtgccagtatcaacattgtcacctgggacctactttcgtacctgagctgcgtggatacttcttggcaactgaaaatttctattttacttcaaagttctttggacttaagaagtcgtcatcactatctgattttatgtttgctggagaacaatcttgcaatcaggatttgtccactcttagaaaaaagtatcctaataggtctgatgaagatttttcacggtattgcttctcgatggcatatattgtggctctactgcatgacagtcttggtgtaccactggatgataagaggattgagtattcaaaccaggttggagacgttcaggttgaatgggctctaggagctttcatcacattgatgcaaaatacaagtttaaagccattgcacaccgccgcagaaccaatccatagcaatagaccattgtttgctgtgctgggaatgtttcttttatgtggagtactttttgtatcaagatggaggaagcccaagacgaaaatcatatatgacttagagaaaggccgatacatcataacacgcatcagctgatgctgaaccttgtgcagaagaactatatttatacgacaggaatagatgttgttgtgttgtacaacaatgtacgagttcaattctttgtgttttatcttaggtagcagagttgggtgggtggagcatggaagatagcacattttgtgcgtatagaagaatgtgtaggacaatttgtcatgtgttaattgaattattttgataaataaatatagtttttttgtttca

SEQ ID NO: 4090 - DNA, 1766 bp, Zea mays
gtcacggcgggcgggcggcggcggcggccgggggtcccggttgcacacggctcgccaccatgcctgaccccaccaccaaactcccctctccacgcccccgccggcgccgcaggctcttcagcctctgcctcggcacagcgctcctcgcgctcatcgtctccgcgctcgtccacgtcgtcgcccagccgccgggtcccgctcccgcctccgcgcgcttctccgtcatcatagacggaggcagcacgggcacccgggcccacgtcttcgcggcggggcccgacggccgcccggatctggcgcgctccaccgtgatgcgcgtctccccgggcctctcgtccttcgccgccgacccggcgcgggccggggagtccctgaagcctctgttagattttgcgagggataagattggcggcgccgttagggaggcggaggtgcggctcatggccaccgcagggctgcgcctgctcgaggagcgcgcccaggaggcgatcttagcgtcttgtagggacgttctacgagcctctgggttccggttcgaggacgcgtgggccaaggtgatcccaggctcggatgaaggtgtctatgcttgggttgcggcaaattatgctcttggaagacttggaggggatcctaacaaaaccgttggaataattgaacttgggggcgcttcagctcagcttacctttgtttctgatgaagtacttccacccaaactgtcatataattatacttttggtgaaacaacatacactctctataccaacagctttttaaactttggtcaaaatgcagctcaagactcattccatgaaatgctgaggtcaagaggctctttcaaaaatggtacacttgctgatccttgtgctcccagaggatattcacgcaatgaaggtgcttcaaggtcaacattagagaaccagtatgttaataatgggactggaaactttacagagtgcatatcttcttcacaacttttactgcaaaaaggaaaggaaaagtgccagtatcaacaatgtcacctgggatctacttttgtacctgagctgcgtggatacttcttgggaactgaaaatttatattttacttcaaagttctttggacttaagaagtcttcatcactatctgatttcatgtttgctggagaacaattttgcaaccagcatttgtcgagtcttagaaaaaggcatcctaataggtcagatgaggatttttcacggtattgcttctcgatggcatacattgtggctctactgcatgacagtcttggtgtaccactggatgacaagaggattgagtattcaaaccaggttggagacattcaggttgaatgggctctaggagctttcatcacactgatgcaaaatacgagtttaaagccattacacaccaccgcagaatcaacccatagcaatagaccattgtttgctgtgctgggaatgtttcttttatgtggagtactctttgtatcaagatggaggaagcccaagacgaaaatcatatacgacttagagaaaggccgatacatcataacacgcatcagctgacgctaaatcttgtgcagaagaactatatttatacgacatgaatagatgctgtgttgtgcaacaatgtacgagttcaattctttgtgtttttacctttaggtagcagagctgggtgggtggagcaggaagatagcgcatttgtgcgtatagaagaatgatgtgtagaacaaattgccatgtgttaattgaattatttgatgaataattatagttgctttgttc

SEQ ID NO: 4091 - DNA, 1835 bp, Zea mays
attttaaataaaaataaagctcgacgtcgtcgtcacctctctcgccgtccacgagtcacggcgagcggcgtcgacggcgggcgggggtcctggccgttcactgccatgcctgaccccaccaccaaacccccttcgccacgcccccgccgtcgccgcaggctctgcggcctctgcctcggcaccgcgctcctcgcgctcctcgtcgccgcgctcgtccatgtcgtcgccccgcttccgcgcgccgcttccgcctccgcgcgcttctccgtcatcatagacggaggcagcacgggcacccgggcccacgtcttcgtcacggggcacgacggcagcccggatctggcgctatccaccgtgatgcgcgtctccccgggcctctcgtccttcgccgccgacccggcgcgggccggggagtctttgaagccgctgatagattttgcgagggataagattgacggcgcgggcagcgccgctggggaggcggaggtgcgactcatggccaccgcagggctgcgcctgctcgaggagcgcacccaggaggcaatcttagcgtcctgcagggacgttctacgagcctctgggttccggttcgaggacgcgtgggccaaggtgatcccaggctcggatgaaggtatctatgcttgggttgcagcaaattatgctcttggaagacttggaggggatcctaacagaaccgttggaataattgaacttgggggcgcttcagctcagcttgccttcgtttctgatgaagtacttccacccaaactgtcatataattatacttttattgaaacaacatacactctctataccaacagctttttaaactttggtcaaaatgcagctcaagactcgttccatgaaatgctgaggtcaagaggctcttctgaaaatgctacacttgctgatccttgtgctcccagaggatattcacgcaatgaagaaatgatgctgaggatgagtggtgcttcaaggtcaacattagagaaccagtatgttgataatgggactggaaactttacagaatgcatatcttcttcactgcttttactgcaaaaaggaaaggagaagtgccagtatcaacaatgtcacctgggatctactttcgtacctgagctgcgtggatacttcttggcaactgaaaatttctattttacatcaaagttctttggacttaagaagtcttcatcactctctgatttcatgtttgctggagaacaattttgcaatcaggatttgtccacccttagaaaaaaacatcctaataggtcagatgaagatttttcacggtattgcttctcgatggcatatattgtggctctactgcatgacagtcttggtgtatcactggatgataagaggattgagtattcaaaccaggttggagacattcaggttgaatgggctctaggagctttcatcacactgattcaaaatgcaagtttaaagccattacacaccgctgtggaatcaacccatagcaatagaccattgtttgctgtgctgggaatgtttcttttatgtggagtactttttgtatcaagatggaggaagcacaagacgaaagtcatatacgacttagagaaaggccggtacatcataacacacatcagctgatgctgaaccttgtgcagaagaactatatttatacgacaggaatagatgttgtgttgtacaacaatgtaccagttcaattatttgttttattttaggtagcagagctgggtgggtagagcatgaaatatagcacaaatgcgtatagaagaatgtgtagagcaagttgccatgtgttaattgaattattttggtgaataattatacctgttttgttt

SEQ ID NO: 4092 - DNA, 1754 bp, Hordeum vulgare subsp. vulgare
gagatgggcgctggctagccgcgttcataataaataaaataataaaaataaaacgggtcgtcgccgcctctctcgccgtcgacgagtcactgcggcggcgtcggtggcggccaggcacctcgtccgcgtcccaccatgccggagcccaccaaacccctctccccccgcccaagccgcggccgctgccgcctctgcggcctctgcctcggctccgccctcctcgccatcgtcatctccaccctcgtccacctcctctccccgccacctcagccagccccctccccgcgcttctccgtcatcatagacgccggcagcaccggtacccgggcccacgtattctccttgggtcccgatggccggccggatctggcgcgctccgccgtgatgcgcgtctccccggggctctcctctttcgccgcggacacggcgcgcgcgggggagtcgctgcggcctctgatgggatttgccaaggagaaggtagggggcgaggtgggcgccgcggcaactgaagtgcggctgatggcaaccgccggtctgcggctgctcgaggagagcgtccgggaggcgatcttggtgtcctgcaggaacgccctcaggtcctccgggttccggttcgaggactcatgggccaaggtgatcccaggttctgatgaaggcgtctatgcttgggttgcggcaaactatgctctgggcacacttggaggggatcctcacaaaacaattggaataattgaactcgggggtgcttcagctcagctgacgtttgtttccgatgaagtacttcctctggaactatcaactaactttacttttggggaaacaacatacactctctatagcaacagctttctgaactttggacaaaatgcagcacaacactcgtaccatgaaatactgaagtcaagaggatcttccaaaaacggtacacttgttgatccttgtgcccctaaaggattttctcgaaaaagaaaagtaacggcgagaacaagcggtgcatcaggatcaaatttagagaatcaatatgttggtaatggaagcggaaactataaagaatgtagatcttcttcactgatgatgatgcaagaaggaaaggagaagtgcgagcatcagcaatgtcacctaggatctaatttcgtccctgagctgcttgggcatttcctagcaactgaaaatttctattttacgtctaagttttttggactagaccggtcttcatcactgtctgattttgtggttgctggggagcaactttgcaacaaggagctgtccacgctgagacaaaagtatctcaatcattcggatgaagatttctcacggtattgcttctcgtcggcatacatcgtagctctgctgcacgacagccttggcgtaccattggatgacaagaggattgagtattcaaatcaggtcggcgacactcatattgagtgggccctgggagctttcattgcaaatacaaaacatacgattctaggggcatcaggggctgccgcagcaccggcacataagcatagaccactccttgctgtgctgggagcgtttcttgcctgtggagtatttttggtgttgagatggaggaagcccaagacaaggattatatatgatttagagaaaggccgatacattataacacgcatcagctgacgctgtgtgttgtgcaggtggtgggcatacactgtacaattttgtattaaatcagctacgcttattttgggacggaggaagtgtattaatcttagctcaagttctgatct

SEQ ID NO: 4093 - DNA, 1899 bp, Oryza sativa Japonica Group
attaataattaataaaaaataaagctcgtcgtcgtcgccgtctccctcgccgccgacgagtcaaagaggcggcggcggtgccggtaccggccgggcgcgccccggccgtgtccccgccatgcccgacctcaccaaacccccttcccctcgcccccgccgccgccgctgccgcctctgcggcatctgcctcggcaccgcgctcctcgccctcctcgtctcctccctcgcccacctcttctccccgccgcagccgcagccgcagctgcagccgccgcggccctccccctcctcctcgccaccgcgcttcgcggtcatcatcgacggggggagcaccggcagccgggcgcacgtcttcgccacggggcccggcgggcggccggatctggcgcggtcggccgtgatgcgcgtcaccccggggctctcctcgttcgccgacgagcccgcgcgggccggggattcgctgcggccgctgattgatttcgccagggagaaggtcgggggcgccgcggcggaagtgcggctcatggccaccgccgggctgcggctgcaggaggggcgcctccaggaggccatcctgtcgtcctgcagggacgtgctcagggcttccggattccggttcgaggactcttgggccgaggtgatcccaggctctgatgagggtatctatgcttgggttgcggcaaactatgctcttggcacacttggaggggatccacacaaaaccattggaataattgaacttgggggcgcctcagcacagctgacatttgtttctgatgaagtacttcctccggaactgtcaagaaatttcacttttggtggaacaacatatactctctatagcaacagctttctaaactttggacaaaatgctgcacaagaatccttccgtgaaatactgcggtcaaaagactccaaaaatggtacacttgttgatccatgtgctcctaaaggatattctcgcatcaaagaagtaatatcaagaccaagcagtgcttcaaaatcaaaattagagaatcaatttgctgatagtggggatggagactttacagtgtgcagatcttcttctttggcactgctgaaaaaaggcaacgaagagtgccgatatcaacaatgccaacttggaccaacttttgtacctgagcttcgtggacatttcttagcaactgaaaatttctattttacatcaaagttctttggactgaagcaatcttcatcactgtctgattttgtgcttgctggagaacaattttgcaacaaggacttgtctactcttaggaaaatgtatcctaatcggtcagatgatgatttttcacgttattgcttctcatccgcatatattgtagctctactgcacgacagtcttggtgtaccactggatgacaagaggattgagtattcaaatcaggttggagacactcaagttgaatgggccctgggggctttcatctcaaacataaaaggcgtaattgtagagccatcagcaactggtagatcagcccatagaagtagaccattgcttgctgtgctgctgggggtgtttcttctaggtggagcactttgcttggcaagatggaggaagcccaagacgaagatcatatacgacttggagaaaggccggtacataatcacacgcatcagctgacgctgacctttgtgcagaggaatcacatatatatacgacaggaatagatgtttgttatgtgtaccatagtgtacgagttcaattctttgtattctttctcctttttaagagctgggtgggagccttagaggagagatcaaggatagcatgtgtgtatgtacaggacttgtagagcattttgccatttacttattctatttatttgatgatggaataacctagctttgctcatgtacgtgatatgtctcagatcc

SEQ ID NO: 4094 - DNA, 2589 bp, Sorghum bicolor
cgcggccgcgtcctccacaaccccaccagaaacggacgccaccccttctccgcctcgcctcgccccttctcgccaccccagccgacgcccgcgatgcggtcgccgccgccgacgccgccgccgtggcggccgcggcgcctccattccgtggtccccgtgctcctgctcgtcgtcgcggcgctggcggcgcggggcgtgggggccgacgacctcgcgagcgacgcgcgggcgctcctggcgttccgtgacgccgtggggcggcgcctggcgtggaacgcctcggacgtcgcgggcgcgtgctcgtggacgggggtctcctgcgagaacggccgcgtggcggtgctgcggctccccggggccacgctctcggggtccgtccccgcggggacgctcgggaacctgacggcgctccacacgctcagcctccgcctcaacgggctatccggcgcgctcccggccgacctcgcctctgccgccgcgctgcggaacatcttcctcaacgggaacaggctgtctggcgggttcccgcaggcgattctcgcgctcccggggatcgtcaggctctcgctcggcgggaacgacctgtcggggcccatcccggcggagctcggcaacctcacgcacctcagggtcctgctccttgagaataatcacttttccggcgagatttcggatgtgaagctaccgccgctgcagcagttcaatgtctcgttcaaccagctgaacggatccatcccggcctctcttcggtcgcagccgcgctccgcgttcctggggacgggcttgtgcggcggacccttggggccttgccctggtgaggtttccccttcccctgctccagcggggcagacaccgtcgccgacgcctgttcccagtggcagtggcggtggtggtggcggcggcgccagtggcgacggcaccaacggtggaagcgggggagaaaatggccataagagcaagaagctctccgttggcgccattgccggaatcgctataggctctgccttgggcgccgcacttctcctcttcctcctcgtctgcctttgtcgcaggtcggggggcaccaggacgcgttctctggagatgccgcctcctgctccagcggctgctgctgttgctggcggcaggaaacctcccgagatgaccagcggcgctgctgtagcgccgttgaccacaataggccaccccaacgctcctatcggccagtcgacgtccggtaagaagctggtcttctttgggacagcggccgctgtggcacctttcgacctggaggacctgctgcgcgcgtcggctgaggtgctcggaaaaggagcgttcgggacgacatacaaggcagtgctcgagtctggggcaactgtggccgtgaagcgcctcaaggacgttactctgtctgaacctgagttccgtgaacgcatttctgaggttggcgagcttcagcacgagttcattgtgccactccgtgcttactactacagcaaagatgaaaaactacttgtttacgacttcatgcccatggggagcctctctgcagtcctgcacggcaacagaagttctggccggacaccacttaactgggatttaaggtcaagcattgccctagctgcagcccgtggtgttgagtacattcactcaacgagctcaatggcttcccacggtaacatcaagtcatccaatatcctcctgggcaaatcatatcaagcacgtgtatcagacaatggccttaacactcttgttggtccatcatcttcaccgtctcgcaccactggatatcgagcacctgaggttattgattctcggagggtttcccagaaggcagacgtgtacagctttggtgttctgttgcttgagctggtcacaggcaaggctcccagccaggctgctctcaacgacgagggcgtcgacctgcccagatgggtgcagtcagttaatcgctctgagtggggttcagaggtgtttgatatggagctgacgagacatcagactggcgaggaaccgttggctcagctcgtgctgcttgctatggactgcgtagcacaggtcccagatgcccggccatcaatggctcatgttgttatgcggatagaggagatcaagaagtcaagcggggcctcaaacatcgaacaagttgatgatcaatcttccaaggctgaatctgaggtgcagaccaatccgtttgctacctgatctcaattgacctgagagagaatcgtctataactctagtctgcttcaatcgattcaagcatttgatgaatcctatcttcgactgagtcgagtcactgttttcatcttttagcctattggatttaacgggtaacctaattgtcattaagtagctcgggtgctcggtacccagtgctgcggaaggtgattggtggtgtgtttagggaccagttctaaagtgtgattgctaaattgctgtgctcattctagccttgattaggttggttttagcttgtagctgctgctgctgtctttcggctatccatgtgtaattactctagcctcatctagtgtttggaattttttttgccggattaatctctcgtttgattttgtcatttttttaatagtttgtttgatttgtcct

SEQ ID NO: 4095 - DNA, 2493 bp, Zea mays
gaagaaacggacgagaccactctcaacctcggctcgttccggaccgggcccgctctcgccacctcagccgccgccgcgatgcggtcgccttcgccaccgccgtggcggctccggcgcatccgtttctcgttccccatgctcctcctcgtcgcgtcgctggcgggggccgacgacctcgcgagcgacgcgcgggcgctcgtggcgttccgtgacgccgtggggcggcgcctggcgtggaacgcctcggacgtcgcgggcgcgtgctcgtggacgggggtcacctgcgagcacggccgcgtggcggtgctgcggcttcccggggcgacgctctcggggacagtccccgcggggacgctcgggaacctcacggcgctgcacacgctcagcctccgcctcaacggtctctccggcgcgctcccagccgacctgtcttccgccgccgcgcttcgtaacgtcttcctcaacgggaacaggctgtcgggcgggttcccgcaggcgattctcgctctcccggggctcgtcaggctctcgctcggcgggaacgacctgtccgggcccattccggtggagctcgacaacctcacacacctcagggtcctgctccttgagaataatcgcttttccggcgagatttccgatgtgaagctaccgccgttgcagcagttcaatgtctcgttcaaccagctgaacggatccatcccggcctcacttcggtcgcagccgcgctccgcgtttctggggacgggcttgtgcggcggacccttggggccttgccctggtgaggttcccccgtcccctgctccagcggggcagacaccgtcgccgacgcctgttcccagtggcaggggcggcggcggcggcggcggcggcggcaccaacggtggaagtggcgtagaaaatggccataagggcaagaagctctccggtggcgccattgccggaatcgtcataggctctgccttgggcgccgcacttctcctcttcctcctcgtctgcctctgtcgcaggtcggggggcatcagaacgcggtctctggagatgccaccttcttccccagcgcctgccggcggcaggaaacctcccgagatgactagcgctgctgctgtagcgccgttgaccacgataggccaccccaacgctcctattgtccagtcgacgtccggtaagaagctggtcttctttgggtcatcggccgccgtggcgtctttcaagctggaggacctgctgcgcgcgtcggctgaggtgctcggaaaaggaacgttcgggacgacgtacaaggcagtgctcgagtctggtgcaactttggccgtgaagcgcctcaaggacgtgactctgtctgaacctgagttccgtgaacgcatttctgagattggcgagcttcagcacgagttcattgtgccactccgtgcttactactacagcaaagatgaaaagctacttgtttacgacttcatgcccaaggggagcctgtctgcagtcctgcacggcaacataacttctggcaagacaccccttaactgggatttaaggtcaagcattgctctagctgcagcccgtggtgttgagtacatccactcaacgagctcaacggcttcccacggtaacatcaagtcatccaatgtcctcctgggcgaatcgtatcaagcacacgtatcagacaatggccttaccgctcttgttggtccatcgtcttcaccgtctcgcgccactggataccgtgcacccgaggttattgatccccggagggtttcccagaaggcagacgtgtacagcttcggtgttctgttgcttgagctggtcacaggcaaggcccccagccaggccgctctcaacgacgagggcgtcaacctgcccagatgggtgcagtcagttagtcgctccgaatggggttcggaggtgttcgatattgagctcatgagacacgaggctgacgaggagctgatggctcagcttgtgctgcttgctctggactgcgtagcgcaagtcccagaggcccggccctcaatggggcatgttgttacgcggatagaggagatcaggaagtcaagcgtgaccacaaacatggaggaagaagttgatgatcaatcttccaaggctgaatcggaggtgccgaccaatccgttcacttcttgatctcagttgacctaaaagagaatcagctataactctagcctgcatccaatcgatcttggactgaatcgactctttttcgtcttttagcttacatgatttaacgggtaacctgattgtcaaaagtagcacgggtgcacggcatccggtgccgcggaaggtgactggtggcggtgtgcttagggaccagttctaaagtgattgctaaattgctgtgctcattctagccttgattagtgctgctgctgctgctgctgtcattcagctacccatgtgtaattactgatagccccatgtagtgtttggaatttctttttggctggatcagtctctcgtttgatctgctcaaaaaaaaaaaaaaaa

SEQ ID NO: 4096 - DNA, 2085 bp, Zea mays
atgcggtcgccgccgcccccaccgtggcgcgccgggcgcctccattccccgctccccatgctcctgctcttcgtcgcggcgctggcggcgcgggcgggggccgacgacctcgcgagcgacgcgcgggcgctcctggcgttccgcgacgccgtggggcggcgcctgacgtggaacgcctcggacgtcgcgggggcgtgctcgtggacgggggtctcctgcgagaacggccgcgtggcggtgctgcggctccccggggcgacgctctcgggggcagtccccgcggggacgctcgggaacctgacggcgctccacacgctcagcctccgcctcaacgggctctccggcgcgctcccggccgacctcgcctccgccgccgcgcttcggaacgtcttcctcaacgggaacaggctgtccggcgggttcccgcaggcgattctcgcgctcccggcgctcgtcaggctctcgctcggcgggaacgacctgtcggggcccatccctgcggagctcggcagcctcacgcacctcagggtacttctcctggagaacaatcgcttttccggcgagatttcggatgtgaagctaccgccgctacagcagttcaatgtctcgtttaaccagctgaacggatccatcccggcttcacttcggtcgcagccgcgctccgcgttcctggggacgggcttgtgcggcggacccttggggccttgccctggcgaggtttccccttccccggctccagcggggcagacaccgtcgctgacgcctgttcccagtagcggtggcggtaacggtagcggtagtggtagcggcgggaccatcggtggaaatgggggagaaagtggccacaagaacaagaagctctccggtggtgccattgccggaatcgctataggctccgccttgggcgccggacttctcctcttcctcctcgtctgcctctgtcgcaggtcggggggcaccaggacgcggtctctggagatgccgccacctgaagcgcctgctgctgctgctgctgctggcggcaggaaacctcccgagatgaccagcggcgctgctgttgcgcccttgaccacaataggccaccccaacgctcctatcggccagtcgacgtccggtaagaagctggtcttctttgggtcagcggctgccgtggcacctttcgatctggaggacctgctgcgcgcgtcggctgaggtgctcgggaaaggagcgttcgggacgacatacaaggcagtgctcgagtctggggcaactgtggccgtgaagcgcctcaaggacgtgactctatctgaagctgagttccgtgaacgcatttccgagattggtgagcttcagcacgagttcattgtgccactccgtgcttactactacagcaaagatgagaagctacttgtttacgacttcatgcccatggggagcctgtctgcagtcctgcacggtaacgtaagttctggcaggacaccacttaactgggatttaaggtcaagcattgctctagctgcagcccgtggtgttgagtacatccactcaacgacctcaacggcttcccatggtaacatcaagtcatccaatgtcctcctgggaaaatcatatcaagcacgtgtatcagagaatggccttaccactcttgttggtccatcatcttcatcgtctcgcaccaccggataccgcgcacctgaggttattgattcccggagggtttcccagaaggcagacgtgtacagctttggtgttctgttgcttgagctggtcacagggaaggcccccagccaggctgctctcaacgacgagggtgtcgacctgcccagatgggtgcagtcagttaaccgctcggagtggggttcactagtgtttgatatggagctcatgagacatcagactggtgaggagcccatggctcagctcgtgctgcttgctatggactgcacagcacaagtcccagaagcccggccgtcaatggcgcatgttgtcatgcggatagaggagatcaagaagtcaagcgtgaccccgaacattgaacaagttgatgatcaatcttcaaaggctgaatcggaggcggcgccgaccaatccgtttgctacttga

SEQ ID NO: 4097 - DNA, 2795 bp, Oryza sativa Japonica Group
atgcgggcggcgtggcggccggcgagcggccgccgcgtggcgctggcggcgatggtggtgctgtccgtggtggtggcggcggcgatggcggacgacctggcgggggacgcgagggcgctgctggcgttcagggacgcggtggggaggcacgtggcgtggaacgggagcgacccgggcggagcgtgctcgtggacgggggtgacctgcgagggcggcagggtggcggtgctgcggctccccggggcggcgctggcggggcgggtgcccgaggggacgctcgggaacctgacggcgctgcacacgctcagcctccgcctcaacgcgctcgccggcgcgctcccgggcgacctcacctccgccgcggcgctccgcaacgtgttcctcaacgggaacaggctctccggcgagttcccgcgggcgttcctcgcgctccagggcctcgtccgcctcgccatcggcgggaacgacctgtcgggctccatcccacccgcgctgggcaacctcacgcggctcaaggttctcctcctcgagaacaaccgcttctccggcgagattcccgacctcaagcagccgctgcagcagttcaacgtgtcgttcaaccagctgaacggatccatcccggccacgctccgcaccatgccgcgctcggcgttcctggggacggggttgtgcgggggccccttggggccttgtcccggtgaggtctcgccttccccggctccgggcgaacagccggtgtcgccgactccggcgaacaacggcgacaagggcggaaatgggggtgaaagtggcaagaagagcaagaagctctctggtggcgccattgcaggaatcgccataggctccgccgtgggagccgcgcttctcctgttcctccttatttgcctctgctgcaggtcgggacgcaccaagacgcggtctatggagatgccgccgcctccgtcttcggctcctgccgttgtcgccgccggccgtaaaccacctgagatgaccagcgccgcggccgtagcacccatggccaccgtgggcaatcctcacgcccctctcggtcagtcgacttcagggaagaagctgatcttcttcgggtctgcggccgcagtggcgcccttcgacctggaggacctgctgcgtgcatccgccgaggtgcttgggaaaggcgcattcgggacgacgtacaaagctgttcttgaatccggggcgacggtggcagtgaagaggctcaaggatgtgaccctgaccgagccggagttccgtgaccggattgctgacattggcgagctgcagcacgagttcatcgttccccttcgtgcctattactacagcaaagacgagaagctgctcgtctacgacttcatgcccatgggcagcctctctgcggttttgcatggtgagaacttgacagttgtattttgttgtgattcttaattcacaatgaaatgttattcttgtgtttgttagtactatgatgcattgttatttggtggtgatgataagagtggcgcttgattgttttgtggctattactttttcctttcctcgtttgactattcatctgccggttttagactctactccgattctgtcttctctaggagacttagtcaggctcggtgttgatgtaggttttctttatcatgttggtatccaaagtacctgttgtttattgggtagtgattcttaattgatgttactcattcaggattgactacgatttagtttgtgactgtttcttgattcccccctgttctggttaaacttttcaattgttcatacttttcagaaagttcaaacataattgatgacattgcaatccttgaggtgcagaattggttgtcttattttttttatatgcacaaattccttcaatgtgttgactcagcttggttagtgtgatttttctttacattgcttatagtttctggggatggtacatgattaattaggatggtatctgatgtcttgatatcatgctggaactaatatttgcattttaagttatagccatatagttgaatactaatgttttcatcattactgttgtgactcctgctaatcatgatactggtacttagacttgaggatagaaaacttatctcacaccatctttacttatttgctaagcagggaacagaggttctggccgtacaccgcttaactgggagacgagatcaagcattgcgctggctgcagcccgtggcgtcgagtacattcactcaacaagctcatcagcatcccatggcaacatcaagtcatccaatgtcctcctgaacaagtcgtatcaagcacgtttatcagacaacggactttctgctcttgttggtccatcgtccgcaccatcccgtgccagtggataccgtgctcctgaggttactgatccccggagggtgtcccagaaggcagatgtgtacagctttggtgttctcttgcttgagctgctcacaggcaaggcccccagtcaggccgctcttaacgatgagggtgttgacctgcccaggtgggtgcagtcagttgtccgctcggaatggactgcagaggtgtttgatatggagctcctgaggtatcagaatgttgaggaacagatggttcagctactacagcttgctatagactgcgttgcacaagtcccagatgcccgaccttcaatgccacatgttgttttgcggatcgaggagatcaaaaagtcaagcgaaagattagaaggtagagatccgcagcagcaggcctcaaatctcgaagcgggcgatgatcagacttctaagccagaatccgctgaggggctcaatccttttgcccct

SEQ ID NO: 4098 - DNA, 1929 bp, Zea mays
gtggggagctcggagaccgagggaggcgaggaaagcggcgggtgccgggccgcccgcgccggtgccgaggtcctcgagtcgaccccttacgtctgtcccccgcttgccgccacccgctcgtggtccttccatttccgtttcctcccccgcatccctttttaatgctcgtcgtcctccattctgtcgccgctgtgttcgtgtctctcctcgctccccgatcgctgcccctgggcgccgcgttcgccgccggatctgggggcgggacggtgccccagacgaaccgatggcgcgggcggcgcttcgattgggcgtgcgcgcgctcgcgctcctcgtcttcgtatcagtggctctgcttccacttgtcagttccgacgatgggtacagacactgcgagggtgtcgtcaggggctgggcggatgcctcgtctgggcgcgtgaaggacggggacaaactgagcctcaaggatttgctcttcttcctccacattcctaggactggaggccgcacctactttcactgcttcctcaaaaagctgtatacgaacgcgcaggaatgcccgcgttcttacgacaaactacggttcgatccaagccatcctgattgcaagctggttgttagtcatgatgactatagcttaacttccaagctgccaagggagagaacttctgttgtaacgatactaagaaacccagttgatcgtgtatttagcacatatgagttctcagttgaagttgcagctagattccttgtgcatccaaacttaacttctgcaaagttaatgactacccgtgtgttaacaaagtctcgtgctgtcagtactttggacatctggccttggaagtacttggttccatggatgagggaagatctgtttgcaaggagagatgccaggggtgtttacaaagttcatagtagtaagaaggttaatgcatatgatgtggacgatatggttatgccattacatcggtacatcaatgatccagttgcccatgaaatcattcataatggggctacctttcagattactgggttaacgaacaactcatattttgatggagcacatgaggttcgacattgtgtcaggaagcatccagatcttggtcgtattgtgcttgaagttgctaagaataggctggaccagatgctatatgtaggacttacggaggatcatgaagaatcagcgaggttgtttgctcatatggtaggagcacaggtgctttcacaatctgggacattgactttagatctcaaggaagatctgcccattgagactgattctcacccatccatggagcctgaggacgaagaaacaaacggacatctgaatagcacacatggttggcagaataatgaagcgatgaactctaccaacgacgaacatggaaaaggaaatatgactgttggtaaactgatggaagcttatgaaacttgcattgccaaactgtggaaatctcaatctggccgacgtaaaatatccctaaaaaaagttcaggaagcgaacttttcaaaagaggcacggaagctggtatctgaggcaattctgaaccaaatcatctcattgaacagacttgatatggaactttatgaccatgctaagaaaatttttactcaggaacatctgatgctaaaagctcagcaatccatggtggggcagcacagacagtttggagaacaaaaggtttgttcaaactcaaagagcacatcttcgttatgcattttattttagttttgacaaagcttttcccgcaagagttcagaacctcagtgatgtatggtgaacatgggttaggtccggagcgtgtaccgtgctaattgttgaactacaatctagataaatttgacaaatagggaacctgcttcgtatcaacagccatcaagtgcttgattgcgttattagttttccaatctatttgacattgcgttaacatt

SEQ ID NO: 4099 - DNA, 1980 bp, Zea mays
gctgggcgtgcgagcgaataaacaacgccgccacgagaagagaggagagcagagggcagtggggagctcggagaccgagggaggcgaggaaagcggcgggtgccgggccgcccgcgccggtgccgaggtcctcgagtcgaccccttacgtctgtcccccgcttgccgccacccgctcgtggtccttccatttccgtttcctcccccgcatccctttttaatgctcgtcgtcctccattctgtcgccgctgtgttcgtgtctctcctcgctccccgatcgctgcccctgggcgccgcgttcgccgccggatctgggggcgggacggtgccccagacgaaccgatggcgcgggcggcgcttcgattgggcgtgcgcgcgctcgcgctcctcgtcttcgtatcagtggctctgcttccacttgtcagttccgacgatgggtacagacactgcgagggtgtcgtcaggggctgggcggatgcctcgtctgggcgcgtgaaggacggggacaaactgagcctcaaggatttgctcttcttcctccacattcctaggactggaggccgcacctactttcactgcttcctcaaaaagctgtatacgaacgcgcaggaatgcccgcgttcttacgacaaactacggttcgatccaagccatcctgattgcaagctggttgttagtcatgatgactatagcttaacttccaagctgccaagggagagaacttctgttgtaacgatactaagaaacccagttgatcgtgtatttagcacatatgagttctcagttgaagttgcagctagattccttgtgcatccaaacttaacttctgcaaagttaatgactacccgtgtgttaacaaagtctcgtgctgtcagtactttggacatctggccttggaagtacttggttccatggatgagggaagatctgtttgcaaggagagatgccaggggtgtttacaaagttcatagtagtaagaaggttaatgcatatgatgtggacgatatggttatgccattacatcggtacatcaatgatccagttgcccatgaaatcattcataatggggctacctttcagattactgggttaacgaacaactcatattttgatggagcacatgaggttcgacattgtgtcaggaagcatccagatcttggtcgtattgtgcttgaagttgctaagaataggctggaccagatgctatatgtaggacttacggaggatcatgaagaatcagcgaggttgtttgctcatatggtaggagcacaggtgctttcacaatctgggacattgactttagatctcaaggaagatctgcccattgagactgattctcacccatccatggagcctgaggacgaagaaacaaacggacatctgcacacatggttggcagaataatgaagcgatgaactctaccaacgacgaacatggaaaaggaaatatgactgttggtaaactgatggaagcttatgaaacttgcattgccaaactgtggaaatctcaatctggccgacgtaaaatatccctaaagaaagttcaggaagcgaacttttcaaaagaggcacggaagctggtatctgaggcaattctgaaccaaatcatctcattgaacagacttgatatggaactttatgaccatgctaagaaaatttttactcaggaacatctgatgctaaaagctcagcaatccatggtggggcagcacagacagtttggagaacaaaagggttggatcggcgtaatgtgcagcgtcgggatttgccctccttggatggtggtcttggttgttctagggatctccacgatcatagttttggtcacgttagctgtaacgacgagaaaaagaacgtctaaacttaaggtttaaccggaattcatgaggcagtctatagattatgatgtatagcctgggaggctgggacaggcgttagagcaactccaataagtataataaaatatagctcctaaaacatag

SEQ ID NO: 4100 - DNA, 1876 bp, Zea mays
cgcacacctcagtctcctgccgtgcgtagtgtgtacgggccaggcggcagagctagctttcactacactcagtggccattgccgttgctagctttcactagctcttagctgcaatgtcggcggcggcgtcgcagagcagtgtcaaggcaatggcggcggccgcagccgctgtggcaatgctgctctcggccgcggcggcggtggccgcgcagcacgattacggcgacgccctgcacaagtgcatcctcttcttcgaggggcagcgctcggggaggctcccgccggaccagcgcctccgctggcgccgcgactccggcctccacgacggcgccgcggccggggtggatctgaccggagggtactacgacgccggcgacaacgtgaagttcgggttcccgatggcgttcacggcgacgctcatgtcgtggggcctgatcgacttcgggcgcagcttcggcccccacagggaggaggcccggaaggcggtgcggtgggcgacggactacctgatgaaggcgacggcgaagcggaacacggtgtacgtgcaggtgggcgacgcgttccgcgaccacgcgtgctgggagcggcccgaggacatggacaccccgcgcaccgtgtacaaggtggacccgtcccacccgggctccgacgtcgccgccgagaccgccgccgcgctcgccgccggctccatcgtcttccgcgacgccgaccccgcctactccaagcgcctcctcgaccgcgccgtcgccgtgttcgagttcgcggacaagtaccggggcccctacagcagcagcctccacgcggcggtgtgcccctgctactgcgactactccggataccaggacgagctgctgtggggcgcggcgtggctgcacaaggcgacgcggcggcgggagtaccgcgagtacatcaagaggaacgaggtggtgctcggcgccagcgacgccatcaacgagttcggctgggacaacaagcacgccggcatcaacgtcctcatctcaaaggaggttctgatggggaaggacgagtacttccagtccttccgtgtcaacgccgacaacttcatgtgcaccctcctccccggcatctccaatcacccccagatccagtactccccaggcgggctgctgttcaaggtcgggagcagcaacatgcagcacgtgacgcagctgtcgttcctcctgctggcctactccaactacctgagccacgccggcgggcgcgtctcgtgcggctcgtcgtcggcgtcgccggtgcagctccgccgcgtggccaagcggcaggtggactacatactgggcgacaacccgctgcggatgtcgtacatggtggggtacggcgcgcggttcccgcggcggatccaccaccgcgccagctcgctgccgtccgtggcggcgcacccggcgcggatcggctgcaaggccggcgccgcctactacaccagcccggcgcccaacccgaacctgctcgtgggcgccgtcgtgggcgggcccaccgacgactccgacgccttccccgacgcgcgcgccgtgttccagcagtccgagcccaccacgtacatcaacgcgccgctcatgggcctcctcgcctacttctcggcacatcccaacccagccgagtcgggcggcgactgaaaaaagcctagggagagtgatagatgacgaacgcacgcacgggcctgggtattttagatgggctttggtttgtcttgttcgggcccgattgttgcctggtgtatccgtacgagtagttgtaactagttaaccagagccactcccttgcctgcaaaagaaagaccagggaagaggaattagtaggctccaagattgtattagctgttaagattatatacgctagtagcaaggttaactgtgct

SEQ ID NO: 4101 - DNA, 1903 bp, Zea mays; identical to SEQ ID NO: 4051

SEQ ID NO: 4102 - DNA, 2226 bp, Sorghum bicolor
atgacaatgccgggctcttcggcgaggccgagcttctcggccttccgcggtgcccggtggcgcgccgatctcggcgtcatccccggctccgccgccgtctccaccgacgatctccgccgcgccgccgccgactcccgccggagatatgctaatctgcggcgaaggctgctaatagatccccatctttccaaggatgaagaaggtgcccctgacttgattgtggagaatccactatcgcagagcccagggagcacttggggccaatatttcaggaatgcagagcttgagaaaatgcttaaccaagatctgtcccgcctataccctgaattgggggacttcttccaaacaagcacatgtcagtctatgcttggacgtgtattgttagtatggagcctcagatacccagagtttggttacagacaaggaatgcatgaactcttagctcctcttctctatgtacttcacgctgatgtgcagcacttcagacaagtcagggaccttcatgaagagcttttgggtgatgattttgatggccaaacttttccagatcgttcaaagctgaacagaagtgacagaaaaaacaatgttgagggtagaacagctaaatttagaagtttgtctgaccttgatcctgatactagagatcttttcttgatcaatgatgcatatggagcagagggtgagttgggtattattttatcagaaaagtttatggagcatgatgcttactctatgtttgagaatttgatgaacggtgcgcaaggagtggttgctatcactgacttctattctctgagtcctgccccagaatcaagcacgggtttaacacctgtaagagaggcatcatctgcaatatatcacttgcttgctagtgttgattcctctcttcatagtcaccttgtggagttaggagttgaacctcagtactttgcattacgatggctccgcgtcctatttggtcgtgagttttcacttgacagtcttctgtttatttgggatgagatcttatcttctcctaaccattcttattgtactgaaatcatgagtagggctgattatcagtttaaagtgttatgttctccccgtggtgcgctgattttatcgatggcagtatcaatgatgcttcatctcagatcctccttgttaggtagtgaacatgcgacttcttgcctagtgaggttgttaaattttccagaagatattgacttaaataacttaattgagaaagccaagttactgcaatcttttgcccttgaagcaaatcttccttcatctccaatgagaggaaattccctcttgactacacccaactattgggaagagacatggaagattctccagccatcaatggaccaaaagggtggtggtgtcttcaagatgaagggaaggggcttcttgagaagaagcttgtctaacactgagtcgaatgtttccagaagcaaggctgctaattttgaaaacaaagatatgacttcaactacgcagtccactactgatgaacttcacaatgctgatgtagttcctgcagagctgataaatagtgtgccacacatgcttatagaaaaacaaaagcatcatgttggtaaaggtactgcagaggctattgggagtaattcaaagaatgcatgtgagacaggccagcatgatggttactgctcaacttcaggtgaaattagagatcctcttggagcagctagtgggtatttatcgaggagcagcagtaccactttgtcatgtggaactgaatacgatcatgatacccatcatctggaagaaacatgtggtccctgtgatgacagagtggttaatgaacctgatccactctttgtgcacgatggtagaactgatgaagcagcaacaacagatcgaacatctggaatagtggatacttatccagttcaagagtgtagactgtgttctgctgatgggaagctgaaaataaaagatgaccaaaattccactagtgataaaggtggccaaaaagaaacattggcaatatgttcaataacaaatgtggctgataaagagttgagcagaacattaagatctcttggtgaatctatggttgagaacatacaggatatcgagatgctgtttcaaccaaattcactctcgacttcagtggagaaacttgagaaagcaattcctagaagcacagagcaagctaaggcagtagcagctctaaaagaactcaggaagatcagtgaccttttacgtcaaatctaa

SEQ ID NO: 4103 - DNA, 2652 bp, Zea mays
ctccctcctttccgtcctcccccttttcccacgccaagaaaccacgctgcgaccatccgtcctcctcgtcgtcgatctcaatctctcttcgtcacgatcgcaaacagatattgacccgtccgatcggctccgcatcgccagtttgcatctgcttccttcggtgagggtgtgtctggttcgtgctcccgcagcgaaggctggagccgagatgacaatgccgggctctccggcgaggccgagtttctcggccctccgcggtgcccggtggcgggcctatcttggcgtcatccccggcttcgccgccgtctccaccgacgagctccgccgcgccgccgctgactcccgccggagatatgctaatctccggcgaaggctgctaatagatccccatctctccaaggatgaagaaggtgcccctgacttgattgtggagaatccactatcgcagagcccagggagcacatggggccaatatttcaggaatgcggagcttgagaaaatgcttaaccaagatctgtcccgcctataccctgaattgggggacttcttccaaacaagcacatgtcagtctatgcttggacgtgtattgttagtatggagcctcagatacccagagtttggttacagacaaggaatgcatgaactcttagctcctcttctctatgtacttcacgctgatgtgcagcacttcagacaagtcagggaccttcatgaagagcttttgggtgatgattttgatggtcaaacttttccagatcgttcaaagctgaacagaagtgacaggaaaaacagtgttgagggtagaacaggtaaaattagaagtttggctgaccttgatcctgatactagagatcttttcttgatcaatgatgcatacggagcagagggtgaactgggtattattttatcagaaaagttcatggagcatgatgcttactctatgtttgagaatttgatgaatggtgcacaaggagtggttgctatcactgacttctattctctgagttctgccccagaatcaagtatgggtttaacaccagtaagagaggcatcgtctgcaatatatcatttgcttgctagtgttgattcctctcttcatagtcaccttgtggagttaggagtcgaacctcagtacttcgcattacgatggctccgtgtcctatttggtcgtgaattttcacttgacagccttctgtttatttgggatgagatcttctcttctcctaaccattcttattgtactgacatcaggagtagggcagattatcaatttaaagtgttatgttctcctcgtggtgcactgattttgtcgatggcagtatcaatgatgctccatctcagatcctccttattagggagtgaacatgcgacttcttgcctagtgaggttgttaaattttccagaagatattgacttaaagagcttaattgagaaagccaagttactgcaatcttttgcccttgaagcaaatcttccttcatcctcatcgagaggaaattctctcttgtctacacccaactattgggaagagacatggaagattctccagccatcaatggaccaaaagggtggtggtgtcctcaagatgaagggaaggggcttcttgagaagaagcttgtctagcactgagtcgaatgtttccagaagcaaggctgctaattttgaaaacaacgatatgacttcaactaggcagtccactaccgatgaatttcacaatgctgatgtagttcctgcggagctgataactagtgtgccacacatgcttatagaaaaacaaaagcatcatgttggtaaaggtactgcagagactattgggagtaattcaaagaatggatgtgagacaggacagcatgatggttactgctcaacttcaggtgaaattagagatcctcttggagcagctagcgggtatttatcgaggagtagcagtatcactttgtcatgtggtactgaatatgatcatgatacccatcatctggaagaaccatgtgatccctgtgatgacagagtggttaatgaacctgatccactctctgtgcacaatactggaactgatgaagcagcaacaacagatcgaacatctggaatagtggatacttatcctgttcgacagcgtagactgtgttctgttgatgggaagctgaaaataaaaacccgaaatgccactagtgctaaaggtgacgaaaaagaaacattggcaatatgttcaatttcaaatgtggctgataaagagttgagcagaacattaagatctcttggtgaatctatggttgagaacatacaggatatcgaattgctgttaaaaccaaattcactctcgacttcagtggagaaacttgaggaagcaattcctggaagcacagagcaagctaaggcagtagcagctctaaaagaactcaggaagatcagtgaccttttacgccaaatctaaccggtacaactacggattcttctatacatatggtgttgtagtttttatacgtatctccattggacaatggatgtgatgtaacatgctaacagtatataaccatctgattgatcggtaaatagtaatttgtatgctccctgcaagctgatacattgtaaatgtacatctgaacggctgcctgctggttgtgaagtgaaggcggcaaacatttttttttggct

SEQ ID NO: 4104 - DNA, 4019 bp, Oryza sativa Japonica Group
atgccggagtgtccagcgagggagcggttctccgcgctccgcggcgcccggtggcgcgccgatctcggcgtcctccccgactgcgcctccgtgtccaccgaggagttccgccgagccgccgccgactcccgccgcaggtcagggccctcggggaattccagctccgttcttggaatgctttggtgaccccggcgatgctttccttgcttggaatgcttagctatgcagcgattctttaattcgttttgcgatgtatggtttcttagatcatctatccccgttagtgtgttgattacgcttaatggtaatgagctgcttagctatgaatttactatttgccactctctcaaaatgccagtgctcaaatgccactctcccaaattttcattcccaaatgccacccgggcccacatgtcagcctcaccctccattcaaacttaagctttacatatgccaatttgatgtttcatttctctgggcattcgatgacggtgaatgttgtatggtattatactgttatgaattactctacttattaatatggggggcaaaagaattcaagtttgttaggttcgaaggtttttactcctggttttgtaatttgtttttgttgtaggtatgctaatttgcggcggcggctgttaatagatccccatctctctaaggatgaagaaaacgctcctgaccttgctgtggaaaatccactatcacagaacccaggtgggtttgcttttgcccttcagtaaatgttacttctctgagttgccattacttgcatcaccaggcataaatacttgttgatttagtctgttacataagatggtcagtggtgttttgttagtcccacagtgattgctgaaacaatactgccaaacattctgttattaactgtttgtttatacagttggtgctagaataacataggaaggtcagggtggatgaggggaggaggtggtaatatgttaattcagatactctaagcataggtgattgttttaagtccgttgagctgccagaaaccttgttttgttgctacatcatcacaacttcaggtgataagtgataactgattgctcacaattagcagaactcatcagtgggacattttcttgattcagcactatcctaggtgatataataaagtggcgtcagtcgcatgtttggtggcatctttcttcacaaactgatcactatttagtttcattatattgtgttatttggttctaatcattatgtctcgtgaatgcagaaagcacttggggccaatatttcagaaatgcagaactagagaaaatgttgaaccaagatttgtctcggctctaccctgaattgggaaatttcttccaaacaaccatatgtcagtccatgcttggacgtatactgttagtttggagccttaggtacccagagctcggttacaaacaaggtaagccattgatgtgtacacttctcatgtgacctaacaatcacagattccatctaaagacacaatcttgcaatatgatgttcctaaaccgaggcagcagctttgaaataggccaagtgaattggttactaggtttggcaattggtaatgtaatattgttgaagtccatgggcatagcacgttgaacataagtttgtttggactatagaagtaataataataatttcttccatataggcgaatataagtcttcatcaataatcaacacttgaaactaggtactaatgttctaattgcactaaagatccatctgtccttgtaaatttgtcgacatcaatcacattccttctttctgcaggaatgcatgagctcttagctcctcttctctatgtcctccatgctgatgtgcattacttcaaacaagtcagggagcttcatgatgagctttttagtgatgattttgatggccaaacatttccagataggataaaactgaacaggagtgacaggacaaacacaattgagggtagtgcagctaaaataagaagtttggatgatcttgattctgatacgagggaccttttcttgattaatgatgcttatggagcagaaggggagctgggtattattttgtctgaaaagttcatggagcatgacgcttattgtatgtttgagagtttgatgcatggttcgatgaatggtgcacaaggtgtggttgctattactgacttctattctctcagtcctgcaccagaatcaagcacaggtttaacacctgtaagggaggcatcatctgcaatatatcacttgcttgctagtgtggattcccctcttcacagtcatttgatggagttgggagtagagcctcagtactttgcgctacgatggctgagagttctattcggtcgtgaattttcacttgacaatcttctgtttatttgggatgagatcttctcatctcctaaccattcatattgtgcagacataaagaatcaatcagactatcagtttaagattttatgttctcatcgtggtgccctgattttgtcaatggcagtttcaatgatgctccatctcagatcttccttgctaggaagtgaacatgcaacttcatgcctagtaagattgttaaattttcctggagacactgacttaaagagcttgattgataaagccaaattattgcaaccttttgctcttgaagcaaatcttccttcatctcctctcagaggaaaatctcccttgaatccacccaactactgggaagagacatggaagatactccagatgtcagaagagaaaagaagtggtggttcaattaataggatgaaggtaagaggtttgttcagaagaagttcccccaacactgaatcaaatgtttcgagaaccaaggatgctaattttgaagatagcaattcgacttcaggtacgcaatctactgctgatgaacatcacagatctggtatagttccagtaaatttggtaaatggtacacttcacacgcctataagagaacgaacaagtcatgttgaacaatgtactgcagagaatatgatcaccacctcaaacaatgtattggaggcaggacagcctgaagttcaccgctccagttctgttgatgttagagatgctcttggagttgcatgtggaaatttatcaagagacagcagtacctcgttatcatgtggtacggagtatgaccatgagactcatcatgcagatgagccatgtgcttcccatgatgataaggtggttagtgagcctgatccactccctgtgcataatgataagattgatgaagtgacaatcgcagccattcaaacatgtgcattggtcgattatcagcaatcacaacagaataaaccgtgttctgttaatgggaaatcagaggtaaaatatcaacaaaattttgctgtgcatgaagttggccgcaaagaaacatttgaactaggttcaagctcagatgtggctgataaagagctacttggaacattaaggttacttggggaatctatggttgaaaacattgaggtaaccatgcttgacaggaagttcttgattttaagatttaaagtacaaaaatgttatttccacttgagagtaattcattgctatataccctaccactttctgaacaaaacaccgtgagcatatatgtaatataacttaacatggttgatgcattttcatcttaagatcctactttatgttggttgcgtgtataataatccctatattcttcaacttaacaattgagttggcagtatagttcataatcccatatatagattcctttatttcagtactgtcctcctgtttttttctaagaaaaaacaaaagattaaaaaaaacatggtggtgtaacttcagactataaaactatgctcagaccatgagaatgttatgctatatactttttttatttggctgattttctggcttttgtcaggttattgacttgttgtttcaaccaaatttgcactctacctcactggataaatcagaggaaattgttcttggtagtatagagcaagctaaagcaaaagcagctctagaaggtctcaagaagattagtgaacttctacgacgaatc

SEQ ID NO: 4105 - DNA, 2374 bp, Zea mays; identical to SEQ ID NO: 1570

SEQ ID NO: 4106 - DNA, 1458 bp, Sorghum bicolor
ggtgtcccaggccaaccgtgtcgttcaaggggagcgctctgctcgacttcgactcctccactgctccggctctgctctgccagtcctcgcgtagcggtgtataggctgagaggcaaggcgagatgaggagcgggcggcggatggcggcggcgctggtggcggtggtgtggtcgtcgtgggcgctggcgctggcggcggcggcgcagagctacaatgccgtcttcaacttcggcgactccatcaccgacaccgggaacctctgcaccaacgggaggccgtcgtcgatcaccttcacccagccgccctacggcgagacctacttcggcacgccgacgtgccgctgctgcgacggccgcgtcatcccggacttcctcagctccaagttcgggctgccgttcctcccgccgtccaagtcgacgacggccgacttcaagaaaggcgccaacatggccatcaccggcgccaccgccatggacgcgcccttcttccgctcgctcggcctctccgacaagatctggaacaacgggcccatcagcttccagctgcagtggttccagcaaatctcctccgccgtctgcggcaacgactgcaagagctacctgggcaactccctgttcgtgttcggcgagttcgggggcaacgactacaacgcgatgctgttcggcaactacaacgcggaccaggcgagcacgtacacgccgcagatcgtgagcaccatcgccaacggggtcgagaagctgatcgcgatgggcgccacggacatcgtggtgcccggggtgctccccatcggctgcttccccatctacctcaccatctacggcacctccaacagcggcgactacgacagcctcgggtgcctcaagaagttcaacgacctgtccaccaaccacaacaaccagctccagacgcagatctccagcctccaggccaagtacaagtccgcccgcatcatgtacgccgacttctactccgccgtctacgacatggtcaagaaccccggcagctacgggttcagcacggtgttccagacgtgctgcggggcgggaggcggcaagtacaactaccagaacagcgcgcggtgcggcatgtcgggcgcctcggcgtgctccaacccggcggcgcacctcagctgggacggcatccacctcaccgaggccgcgtacaagcagatcaccgacggctggctcaacgggccctactgccgcccggcgatcctccacagctaagctaagcccatcgtcagggactcaggggcagcagagcgagcggggaccgattaattaattactattttttatttgttgttgttgttattatatcttctgtgtttatgttgccgggaaaaaagtgtctcggcaactgcatgcatctgtttttcttgttcttccctgttgtaacttatatatattatattatgtatactggtcttcatttacaaatcaaatggtatatattttc

SEQ ID NO: 4107 - DNA, 1348 bp, Zea mays
cagcgcgctgctcgactcgactcgacttcctctgcaacgcgtgtccggtgtaggctgagagagtgagtgagaggcgagatgaggagcgggcggctggcggtggcggtggcggtggctctggcgtgggcgttcgcggcgtcggcggcggcggcggcgcagaagtacaatgccatcttcaacttcggcgactccatcaccgacaccgggaacctctgcaccaacgggaggccgtcgcagatcaccttcacgcagccgccctacggcgagacctacttcggcacgccgacgtgccgctgcagcgacggccgcgtcatcccggacttcctctgctccaggttcggcctgccgttcctgccgccgtccaagtccacgacggccgacttcaagaagggcgctaacatggccatcaccggcgccacggccatggacgcgcccttcttccgctcgctcggcctctccgacaagatctggaacaacgggcccatcagcttccagctgcagtggttccagcaggtcacctccgccgtgtgcgggcaggactgcaagagctacctggccaactcgctgttcgtgttcggcgagttcgggggcaacgactacaacgccatgctgttcggcaactacaacgcggaccaggccagcacgtacacgccgcagatcgtgagcgccatcgcggccggcgtggagaagctgctggccatgggcgccacggacgtggtggtgccgggggtgctccccatcggctgcttccccatctacctcaccgtctacggcacctccaacagcgccgactacgacgcgctcggctgcctcaagaagttcaacgacctctccaccaaccacaacgcccagttgcaggcccagatctccgccctccaggccaagtacaagtcggcgcgcatcatgtacgccgacttctactccgccgtctacgacatggtcaagaaccccggcagctacgggttcagctcggtgttccaggcgtgctgcggctcggggggcggcaagtacaactaccagaacagcgcgcggtgcggcatgtcgggcgcgtccgcgtgctccagcccggcgtcgcacctcagctgggacggcatccacctcaccgaggccgcctacaagcagatcaccgacggctggctcaacgggccctactgccgccccgccatcctccacagctaagctaagcgaggggagggcgattaattttttattgttgccatgttatttatacctgtgtttacgttgccgggaaaaaagtgtcccggcagctgcatgcatgtgttgcctcttgtaacttgttatactggtggtcttcatttacaaatcaaatggtatagatttttcatgg

SEQ ID NO: 4108 - DNA, 1746 bp, Zea mays
cgcaaaaccacatggaaagtcgccggtggatcgcaaagcggttgctgaaaaggcccggccacacagcgcacgtcctcgccggcgctcctgccggtgccggtgccggtgccggggctaagtaaccaccggaacgggcgcgcgacccgtgtcgggtcggccgcgttcgtttgattcggttataatagagtattagtttattactaaatgaaatgatggcatgcatgtggttagccaggttgacagaagtcacagaacgcactgctcgactctagctgttccaggcggcgagacgcaagcgcaagcgcaagcgttttgttggcgaggctacaaaaggctgctccaggccagccgtctcgttccagttccattcaagcgcactgctggactccaactcgactgctctgcgtagcggagtaggctgatcagaggcgagatatgaggagcggccggcggatggcggcagctctggtggcgctggcgtgggcgctcgcggctgtggctgtggcggcggcgcagaagtacaatgccatcttcaacttcggcgactccatcaccgacacggggaacctctgcaccagcgggaggccgtcgcagatcaccttcacgcagccgccctacggcgagacctacttcggcacgccgacgtgccgctgctgcgacggccgcgtgatcccggacttcctctgctccaagttcgggctgccgttcctgccgccgtccaagtcgacgacggccgacttcaaggagggcgccaacatggccatcaccggcgcgactgccatggacgcgcccttcttccgctcgctggggctctccgacaagatctggaacaacgggcccatcagcttccagctggagtggttccagcaggtcgcgtccgccgtgtgcggcggggggcaggcgcagcaggccgactgcaagagctacctggccaactccctgttcgtgttcggcgagttcggcggcaacgactacaacgccatgctgttcggcaactacagcgcggaccaggccagcacgtacacgccgcaggtcgtggccgccgtcgccagcggcgtcgagaagctggtggccatgggcgccaccgacatcgtggtgcccggcgtgctccccatcggctgcttccccatctacctcaccttctacggcacctccagcagcgccgactacgacagcctcggctgcctcaggaagttcaacgacctgtccaccaaccacaacaaccagctgcaggcccagatctccggcctccaggccaagtacaagtcggcgcgcatcatgtacgccgacttctactccgccgtctacgacatggtcaagaatccaggcagctacgggttcagcacggcgttccagacgtgctgcgggtccggaggcggcaagtacaactaccagaacagcgcgcggtgcggcatgccgggcgcctccgcgtgctccaacccggcggcgcacctcagctgggacggcatccacctcaccgaggccgcgtacaagcagatcaccgacggctggctcaacgggccctactgccacccggccattctccacagctaaagcgacaggggggcccaattaattattaattattattatttgttgtttacgttgccgggagagaaaaacaaagtgtctcagcaactgcatgcatgtgttcctggtccctcactgctatgacttacagagtattatatattagtactatgtatactggtcctcatttacaaatcaaatggtatagggttttct

SEQ ID NO: 4109 - DNA, 1626 bp, Hordeum vulgare subsp. vulgare
gattcaacccctctgctctgctcctcccctcccgcacagcacgccgtcttccgaccccttctccccctccccgtagccgccttgctcgctcgcttgcttgcttgcgcgtctgaagatggcgaggtcgtcgtcgccgatggcgaggcagctgcagctgctgctcgtggtgctgtgtgcgtcgtggctggccttgcaggcggcggcgcagaagtacaatgcggtgtacagcttcggcgactcgatcacggacacgggcaacctgtgcaccaacgggcggccgtcggcgatcaccttcacgcagccgccctacggtgagacctacttcgggagccccacctgccgctgctccgacggccgcgtcatcgtcgacttcctcagcaccaagtacggcctccccttcctgcccccctccaagtccacctccgccgacttcaagaagggcgccaacatggccatcaccggcgccaccgccatggacgcccccttcttccgctccctcggcctctccgacaagatctggaacaacgggcccatcagcttccagctccagtggttccagaccatcacctcctccgtctgcggcagcagctgcaagagctacctggccaactcgctcttcatcttcggggagttcggggggaacgactacaacgcgatgctgttcgggaactacaacacggaccaggcgagcacgtacgcgccgcagatcgtggacaccatctccgccggcgtggagaagctggtggcgatgggggcgacggacgtggtggtgccgggcgtgctccccatcggctgcttccccatctacctcaccatctacggcacctccagcgccgccgactacgactccctcggctgcctcaagaagttcaacgacctctccacgtaccacaacagcctgctccaggccaaggtgtccaccctccaggccaagtacaagtccgcccgcatcatgtacgccgacttctacgccggcgtctacgacatggtccggagccccagcaaatacggtttcagctcggtgttcgaggcgtgctgcgggtcggggggaggcaagtacaactacgccaacagcgcgaggtgcggcatgtccggcgcctccgcatgcgccagcccggcgtcgcacctcagctgggacggcatccacctcaccgaggccgcatacaagcagatcaccgacggatggctcaacggcgccttctgccaccccgccatcacccactagccaccccacctcagtctgtgcatgcatgcatgggcgcatcaaaaacctcatcgtcgtcgtcgtccatgaatccataatcaatcaatcaatcaatcaaccgatcgattatcattatattattattataattattattatttgttcagtcgggttaactatcatgacgtgtctggggaccggccaaggctaaggttcccggtctgatccggtggcaaaagaatcggggcgcgtctgtggtgacgagtgaagaaggaagaagaagaagaagatgacggcaagcgtcgtggaatagtagtgcggcccgtgctgctgttgttgttgtgaacctgtaacctgatagtagtaattgttttgtcccatggatggaaaaaaagaatgaaaaggaaagaaataatgcaagg

SEQ ID NO: 4110 - DNA, 2243 bp, Hordeum vulgare subsp. vulgare
cgaggcagctgcagctgctgctcgtggtgctgtgtgcgtcgtggctggccttgcaggcggcggcgcagaagtacaatgcggtgtacagcttcggcgactcgatcacggacacgggcaacctgtgcaccaacgggcggccgtcggcgatcaccttcacgcagccgccctacggcgagacctacttcgggagccccacctgccgctgctccgacggccgcgtcatcgtcgacttcctcagcaccaagtacggcctccccttcctgcccccctccaagtccacctccgccgacttcaagaagggcgccaacatggccatcaccggcgccaccgccatggacgcccccttcttccgctccctcggcctctccgacaagatctggaacaacgggcccatcagcttccagctccagtggttccagaccatcacctcctccgtctgcggcagcagtgagtccacagtccaccatgcttttctttcctttcttcaaagcccaccatgtctgcagactgcagggcatgctctgctcctcccttaatactctagtacgagcagcataatttcctgcgccatccagctgtctcccccgccactgccactgccactgccatgccgccaatcaagaactttactcactgtccatggaggcatggaccctagccatgcctgcctgattcttgactagtctttctgatctgatgatgcaggctgcaagagctacctggccaactcgctcttcatcttcggggagttcggggggaacgactacaacgcgatgctgttcggcaactacaacacggaccaggcgagcacgtacgcgccgcagatcgtggacaccatctccgccggcgtggagaagctggtggcgatgggggcgacggacgtggtggtgccgggcgtgctccccatcggctgcttccccatctacctcaccatctacggcacctccagcgccgccgactacgactccctcggctgcctcaagaagttcaacgacctctccacgtaccacaacagcctgctccaggccaaggtgtccaccctccaggccaagtacaagtcggcccgcatcatgtacgccgacttctacgccggcgtctacgacatggtccggagccccagcaaatacggtacgtctacatgcctacacactagtcataatacgtactggaggacatgatttcatgcacacgccggcggctagtctcgccgtggcggcactgtgggtgggtggatttcagttttcaaactcgccgtggaccacgtcctccgttgtcggcgcagagcgtttctcgttgttggacgcgcccgtcacgctctgtcctggcagtgcggcagcaccagcacgggacatgcatgcatggtggcgggattaaatgaaggattattcggcgtttaaggctcatgcagtgccgcactgctgcaccacaccacttgctctgcactgctggccggtagcgtggtcaccaccacatgcccgtccgtgcgtccgtgcgtgcgacggccgtagggacggattcctgccgttagcccgggctgcgcgctccggcgccggccgtgggagcgtgatcgtgtccagtgcccagtcctgcctgcacgcggtcgatcgccggccggtgaatagaaaactaggtcgcgggccgacacgggcgcgctcgtgatcccgagcgagtaacgacatcccatcacggggaaaataatggcggatgcgcggggtttggtaggcgctgttcctttaaaatcggcgctacttgcagaagcaaacagccgttgctctgtttccccaacccaacacatgcatgcagccccggtggcggtgggtggtgaacgcccgccgggacacacgccactgctcccgcacgttgccgatcggtctcaaaaccctcggaatcttcgtacgagggatccatccatgatggatgctggatattgcagagcaagaaaccaaaacgatgaaccaacgaacactgtggtgtggtgtggtatgatatgattccgattcaagatctgactcgcgtggatgtggaatgcaggtttcagctcggtgttcgaggcgtgctgcgggtcggggggaggcaagtacaactacgccaacagcgcgaggtgcggcatgtccggcgcctccgcatgcgccagcccggcgtcgcacctcagctgggacggcatccacctcaccgaggccgcatacaagcagatcaccgacggatggctcaacggcgccttctgccaccccgccatcacccac

SEQ ID NO: 4111 - DNA, 1652 bp, Zea mays
cggcggaatgcgcagcgcgcagcctccagaggctataaaaacctgcctcgtcctagctagctagtcacacgtctcattcaagcgctctgccggccagcctagtgctctcggctttctttcatctccctccttttgccacttgctgtagctttaatttgcctggcactttgcacgttgtggccggccggggcctgtgcttccattggtcggcagcaagcaagcaaggctagctagcgtccgtggatcagtcatgggcagccagaggcagaggcaccgagcggtcactggcctcccggcggcgggcgcgcggatgctggccctgctgtgcgcgtcgtcgtgggtgctggtgctcacgacggcgcagaactacagcgccatcttcaacttcggcgactcgatcaccgacaccggcaacctgtgcaccagcggcaggccgtcgcagatcaccttcacgcagcccccctacggcgagacctacttcggcacgccgacgtgccgctgctccgacggccgcgtcgtcgtcgacttcctgagcacccagttcgggctgccgttcctgccgccgtccaagtcgagcagcgcggacttcaggcagggcgccaacatggcgatcacgggcgccacggccatggacgcccccttcttccgctcgctcgggctctccgacaagatctggaacaacgggcccatcagctttcagctgcagtggttccagcagatcgccacctccgtctgcggacagagctgcaagagctacctgggcaactccctgttcgtgttcggcgagttcggcggcaacgactacaacgccatgatcttcggcggctactccatcgagcaggccaggaaatacgtccccaagatcgtcaacaccatctcgaggggcatcgataaactgatcgccatgggcgcgaccgacatcgtcgtccccggggtgcttcccatcgggtgcttccccatctatctgaccatctaccagagctccaacggcagcgactacgacagtctcggctgcctcaacagcttcaacgacctgtccacgtaccacaactccctgctccagaagagggtggacatcatccagagccggcacaggaagacggcgcgcatcatgtacgccgacttctactccgccgtctacgacatggtccgcaacccacagagctacgggttcagctcggtgttcgagacgtgctgcggatcaggcggcggcaagtacaactaccagaacagcgcgcggtgcggcatggcgggcgccgccgcgtgctctagcccggcgtcgcacctcagctgggacggcatccacctcacggaggccgcgtacaagcacatcaccgacgcctggctcagggggccgtactgccgcccgcccatcctgcacaactaatccacagtgcatatggacatgctggaccggcggccggcagcgcgttgtcttttttataaataatttatttattattcgtacaagctttggttggatccatcggggcgccgggggttattaattatagcattggttggtcctttcgttatatttgaccatatattttttttgtttggggtaaggtgtttattatattttgcgttgctaaagaaaaagagctgacgatggcaaagtgtacgtggaatacgatgataatgccatgatt

SEQ ID NO: 4112 - DNA, 1597 bp, Zea mays
acgtctcattcaagcgctctgccggccagcctagtgctctcggctttctttcatctccctccttttgccacttgctgtagctttaatttgcctggcactttgcacgttgtggccggccggggcctgtgcttccattggtcggcagcaagcaagcaaggctagctagcgtccgtggatcagtcatgggcagccagaggcagaggcaccgagcggtcactggcctcccggcggcgggcgcgcggatgctggccctgctgtgcgcgtcgtcgtgggtgctggtgctcacgacggcgcagaactacagcgccatcttcaacttcggcgactcgatcaccgacaccggcaacctgtgcaccagcggcaggccgtcgcagatcaccttcacgcagcccccctacggcgagacctacttcggcacgccgacgtgccgctgctccgacggccgcgtcgtcgtcgacttcctgagcacccagttcgggctgccgttcctgccgccgtccaagtcgagcagcgcggacttcagtcagggcgccaacatggcgatcacgggcgccactgccatggacgcccccttcttccgctcgctcgggctctccgacaagatctggaacaacgggcccatcagctttcagctgcagtggttccagcagatcgccacctccgtctgcggacagagctgcaagagctacctgggcaactccctgttcgtgttcggcgagttcggcggcaacgactacaacgccatgatcttcggcggctactccatcgagcaggccaggaaatacgtccccaagatcgtcaacaccatctcgaggggcatcgataaactgatcgccatgggcgcgaccgacatcgtcgtccccggggtgcttcccatcgggtgcttccccatctatctgaccatctaccagagctccaacggcagcgactacgacagtctcggctgcctcaacagcttcaacgacctgtccacgtaccacaactccctgctccagaagagggtggacatcatccagagccggcacaggaagacggcgcgcatcatgtacgccgacttctactccgccgtctacgacatggtccgcaacccacagagctacgggttcagctcggtgttcgagacgtgctgcggatcaggcggcggcaagtacaactaccagaacagcgcgcggtgcggcatggcgggcgccgccgcgtgctctagcccggcgtcgcacctcagctgggacggcatccacctcacggaggccgcgtacaagcacatcaccgacgcctggctcaaggggccgtactgccgcccgcccatcctgcacaactaatcctcagtgcatatggacacgctggaccggaggccggcagcgcgttgtcttttttataaataatttatttattattcgtacaagctttggttggatccatcgcggcgggggttattaattatagcattggttggtcctttcgttatatttgaccatatttttttttgtgttcggggtaaggtgtttattatattttgcgttgctcaagaaaaagagctgacgatggcaaaaaaaaaaaaaaaaaaaaaaaaaaaaaaaaaagaaaaaaaaaaaaaaaa

SEQ ID NO: 4113 - DNA, 1590 bp, Sorghum bicolor
attcgagtgcgtgctctgccggcctactgctgccgtacgcgcagcagcaagctagctgccgagatctttcgtctttcatcatcatctccttttgcctgccaccagttgctagctttgcctgccactttgcacgttgtggccgggtgcctgtgcctccatccattggtcgatcggcagcaaagcttagctagcgtctgtcgtcgatcgatcgatcatggcgtctgctgtgattctgaccctgatgctctgcgcggcggcgtcgtgggtggtcgcggcggcggcggcgcagaactacagcgccatcttcaacttcggcgactcgatcacggacacgggcaacctgtgcaccaacggcaggccgtcgcagatcaccttcacgcagcccccctacggcgagacctacttcggcacgccgacgtgccgctgctccgacggccgcgtcgtcgtcgacttcctcagcactcagttcgggctgccgttcctgccgccgtccaagtcgagcagcgccgacttcaagcagggcgccaacatggccatcacgggcgcaacggccatggacgcccccttcttccgctcgctcggcctctccgacaagatctggaacaacgggcccatcagctttcagctccagtggttccagcagatcgccaccgccgtctgcggacaaagctgtaagagctacctggccaactccctgttcgtgttcggcgagttcggcggcaacgactacaacgccatgatcttcggtggatacaccatcgagcaggccaggaaatacacacccaagatcgtcaacaccatctctagaggcattgataaactgatcggactgggcgcgacggacatcgtcgtcccgggtgtcttgcccatcgggtgcttcccgatctacctgaccatctaccagagctccaacagcagcgactacgacgacctcggctgcctcaagagcttcaacgacctgtccacgtaccacaacaccctgctgcagaagagggtggacatcatccagagcaggcacaggaagacggcgcgcatcatgtacgccgacttctactccgccgtctacgacatggtccggaacccacagacctacgggttcagctcggtgttcgagacgtgctgcggatcaggcggcggcaagtacaactaccagaacagcgcgcggtgcggcatgtcgggcgcgtccgcgtgcgccaacccggcgacgcacctcagctgggacggcatccacctcaccgaggccgcgtacaagcagatcaccgacggctggctcaaggggccctactgccgcccgcccatcctgcacaactaattccactcatggatagatggatgctttgcatggaggcggcgcgttattttttataaataatttatttatttgtatttatatccatataattagcttggttggattaattggattaatcgcggcgggggttaaatattattgcgttggttggtccttcgttcgaccatttttgtttgtttggaggaggtgtttattaattgcgttgctcaaaaaaataattaatggcaattgtgatatatatatatatatgagatgacactatcgtgttcattatagtc

SEQ ID NO: 4114 - DNA, 1391 bp, Oryza sativa Japonica Group
atcatcacatcatccactgctctgcttctcctcttcttttcttggcttgtgctctgttttaatttctttgcaatgatggggaggcagagctcgtcggcggcgaggagggtggtggtggtggtgtgcgcggcgatggtggtggcggcggcggcggcgcagaagtacaatgcggtgtacaacttcggggactcgatcacggacaccggcaacctgtgcaccaacggccgcgtcgtcgtcgacttcctcgcgagtaagttcgggctgccgttcctgccgccgtcgaagtcgacgagcgccgacttcaagaagggagcgaacatggcgatcaccggagccaccgccatggacgccaacttcttccgctccctcggcctctccgacaagatctggaacaacggccccatcagctttcaaatccagtggttccagcaaatctcctcctccgtctgcggccagaattgcaagagctacctggcgaactcgctgttcgtgttcggggagttcggcggcaacgactacaatgcgatgctgttcggagggtacagcgcggaccaggcgagcacgtacacgtcgcagatcgtggacaccatctccaacggcgtcgagaagctcatcgccatgggcgccgtcgacgtcgtcgtccccggcgtgctccccatcggctgcttccccatctacctcaccatctacggcacctcctccagctccgactacgacagcctcggctgcctcaagaagttcaacgacctctccaccaaccacaacaatcagctcaagaccaagatctccgcgctccaatccaagtacaagtccgcccgcatcatgtacgccgacttctactccggcgtctacgacatggtccgcaaccccggcaactacggatttagcacggtgttcgagacgtgctgcgggtcaggcggcggcaagttcaactacaacaacaacgcgaggtgtgggatgtcaggcgcatcagcgtgctccaacccggcgtcgcatcttagctgggacggcatccacctcaccgaggcagcttacaagcagatcactgacggctggctcaacggcccgtactgtagcccggccatcctccacagctaaggcaaaatgactggaaagaacgagccattagttaatttattactttattattaaggctggtgtttattaattaagcgggaattaattaaaggggaattgtttgggttcttgatttttatttgggtggcatatatggtgggtggtgtgacggtgaaatggtttacttgcgttgccaaaaaagcaaagaaagcgatggcatctgtagaataaatgttggttactgttgtaatttgataattgtttctcttccagaatcaaatgaatcatcaatggtattatactcagttattttt

SEQ ID NO: 4115 - DNA, 1464 bp, Zea mays; identical to SEQ ID NO: 4024

SEQ ID NO: 4116 - DNA, 1598 bp, Zea mays; identical to SEQ ID NO: 1571

SEQ ID NO: 4117 - DNA, 1343 bp, Dactylis glomerata
aagcaaagcatcccagcaggaagagctactcctcctgcctgcttctcctccttgagctcctcccaccgtccgtcgccgatcgaggaagatgaggggcgcctcgcttctgctgctcgtcgtcctctccgccgcggctgctgccccgcagcttgtgggagcagcgagtggagaccattccctaagaatcatccagaaagacattatagagacgatcaacaagcatcccaatgccgggtggactgctggacacaatgcctacttggcgaactatactattgagcaatttaagcatatcctgggagtgaagcccacacctccgggtttactagctggtgttccaaccaaaacttactcaaaatcagaggagctcccgaagcagtttgatgccagatctaagtggtctggttgcagcacaattgggaccatacttgatcaaggtcactgtggttcctgctgggcttttggtgctgtggagtgtctgcaagatcgtttctgcattcatcagaacataaatatttcactttctgccaatgacctagtggcttgctgtggttttatgtgtggtgatggttgtgatggaggatatcctatcaaggcatggcaatactttgttcagagtggtgtcgttactgaggagtgcgatccatactttgatcaggttggctgcaaacatcctggttgtgaacctgcttatgatacgcccaagtgtgaaaagaaatgcaaggtgcagaaccaagtttgggaggaaaagaaacatttcagcatcaatgcatacagagtaaactctgatcctcatgacatcatggcagaggtctacaagaatggccctgtagaagttgctttcacagtttatgaggactttgcacactacaaatcaggagtatacaagcatgtcacaggtggcgtgatgggaggtcatgccgtcaagttgattggatggggaaccagtgatgctggcgaggattactggcttcttgcaaatcagtggaacagaggctggggagatgacggctacttcaagatcataagaggcaagaatgaatgtggcattgaagaagaagttgttgccggtatgccatcgacaaagaacatggccggaaaccatggcagcgcttttggaactgctatactttgaagtttgaacagcgccctgacctcagatgctggcggaattagctatttgcatgtcaaatgaagcgggtaaattagcttgtggtggttccaggattgtgtatctggtacaatagcacacgttccaatgctgatatgttgttgaaaccacaacagttgttcagaaataaaaaaacgcataatatctaaaaaaaaaaaaaaaaaaaaaaaaa

SEQ ID NO: 4118 - DNA, 3464 bp, Oryza sativa Japonica Group
gggggggagctgctgaggactgaggtaggggaaagaagagaagagaagcaagcaacaccaacagcaacacgcaaggagtggaggactcttcaaggtctggagagtggagaggaagaggaatcctcctcagtcctcaccttcagatttcagaacacaggcaatcggccctagctgcaatccaacaagatgggcatgcctctgctgctgctgctgctgatcctcgtcgctgctggcccccaggcaggcagagctgcaaagccaatcccaaatctccagctcatgaccaaggagggcggcagttcaagaatcatccaggacgacatcataaaggcaatcaacaagcatcccaatgctggctggacggctgcacggaatccatactttgcaaactatactgtaaataacaacaccctcctgttgttgttttcttttttttttttgcggggacaccttcctgttgttgttagtattgcatacatcaaaacatttatctcatgcttgttcggtggcctcaataatcctcctgtacagactgcgcaattcaaacatatccttggagtgaagccaacaccgcatagtgtgctaaatgatgtccctgtcaaaacttatccaagatcgctgatgcttccaaaggagtttgatgccaggtctgcatggtcacagtgtaacacaattgggaccatacttgatcagggtcactgtggctcgtgttgggcatttggtgctgtggagtgtctccaggatcgtttctgcattcatttcaacatgaacatttcgctatctgtcaatgacctagtggcatgctgcggtttcatgtgcggcgatggttgtgatggaggctatcctatcatggcatggcgctactttgttcggaatggtgttgttaccgatgagtgcgatccatactttgatcaggtcggttgtaagcatccaggatgcgaacctgcttatcctacgccagtgtgcgagaagaaatgcaaggtgcagaaccaagtttggctggaaaagaagcatttcagtgtcaatgcatacagagtaaattctgatccacatgacataatggcagaggtctaccaaaatggccctgtagaagttgctttcaccgtttatgaggattttgcacactacaaatcaggagtatacaagcacatcacaggtggcatgatgggtggtcatgctgtcaagttgattggatggggaaccacggatgctggcgaggattactggctgcttgcaaaccagtggaacagaggatggggcgatgatgggtacttcaagatcataaggggcacaaacgaatgtggcatcgaagaagatgttgttgctggtatgccctcgacgaagaacatggtgaggaactatgatagcgccttcggagtcggaacggccatagtttgactttaatcaatgttaatggcctcaaatacggttgggatcatgtaaatttgtcctgggtgatttctggattttgcacacacgggcaggcttctcgagactgatcggagtttaggctacttgtccagaaacacattggaataatatctgaataatagatgtattctctctctctctctctctctctctctctctctctctctacgtccggttaactacgggatgtgacgtagaggtgttagggaggagcgcacgttaatctcgctgtaatccaagttgagacttgaagaattaatgtgtatgctgtaagtcaaatgatatgcgatctgtgcgctgcttactagtatcccaaaagtatggattttgttcaatcagtctacagcttgacacaattgcagcagcaagcactcgcttggacgcatctagctccaaattcctgcaaaacactggatatcttggttcaatgggaaccgagaagtcggacaatgacagcaggcatcgatttcaggattccccattcaaggtaccagaatgcagatacagtaaataaaaacgatgatacattcatatggacagaatcacagaatacaaacagcgcagagcaatcggtacaatcgacaacagatcgaatggcacactgcctttttcctatcagtaagagttagctcagcgactccgagacgcagccgccatggccgtctccatggcattcttgaggagcaacatttccttggcattcttgaggagcaacataaacgatgatacattcataatcggtacaatcggcaacagatcgaatggcacactgcctttttcctattagtaagagcttagctcagcgactccgagacgcagccgccatcgccgtctccatggcattcttgaggagcaacatcatttccttggcattcttgatggctttcctgaggaggagcaacagcaacatcccgcggcggccagtgctccaccagcctctccacgggcactttgacgacatcgcggcgaacaccgatatctgagacatatcgccccacgcagtacatgccgctcgtcacaaccaccagcccaccagcgctggtcgtcaggaaccggagcggcgacgaggccaccgcgctgaaggcagccgtgagggaggccagctgcccgctgcgccccacgctgaaagcggtctccaccagcagccccgtcttgcagtatatcgcaaagtcctcgcaattgttcttgaacaggctatacgtcccgaacccgctgttcaggaggtgctgggcacggtggatcacgatgtcggcggggtccgaggctgccagggtgcacgttcctcctcgcgctttcacgaggaagaaagcgggggacaccgcgtagtcgaacaggtacggattgcccccatccaagaagcaatcgaggcacgacattatgaccccctgctgcttaatcaggtgaccacatttctcgcagggaggaccctcctccgttgctggagatgagctgaaaaggaacatgtccaagaatgttcctgtcccaatttcatgtccagttgctcttgtaaaatgaataaccatggcatcaccaatatatatccctgaaaatgaagttcaatttcgggaacaggtcagagacatggtcttagcgagtatccttgctccttagcaaataagtcaacaggaaaacatgaactgactgtataatgtggggttaacggacatggagcacataaatgttgcgtggcatgccaatcaagtaatgagtgttatgttttccataatagatggcaaatgacatcgccgacggtatattgtgcatatgtcggttaccagcatgtaggagaggctttattttcgggaatgcgcaaaatgattgcacgtcaatatattagaataggagaggctttatttggaaaggggatggccattgtgatggtggattggtgggcattgtttagttaattgtctaaggtttgtacaccaaaaaaaagggcaggttgggcataaaatacctacctgtgttcgggagagctctaaatttgagatggatttatcttaaatggaaagataagcagaatccttcgattg

SEQ ID NO: 4119 - DNA, 1384 bp, Hordeum vulgare subsp. vulgare
agctgcagcagctactactcccgcctgcttccttgcttgcttgctttgcttccccgtcgaggaggaggaagaagaggatggggggcgtgggcgtctccctcgcgctgctcgccgccgccgccgccgtcgtcatctccgccgtcgctgccgccccgcagctggtcggagcagccaaggcagagcattccctaggaatcatccaggaagacatcattcagacggtcaacgaccatcccaatgccgggtggacggctggacacaacccctactttgcaaactacactattgagcaattcaagcatatcctgggagtgaagccaacgcctccgggcttgctcgctggcgtcccaatcaaaacccatccaaaatcagcagatctcccgaaggagtttgacgctagaactcaatggtctagttgcagcacaatcgggaacatacttgatcaaggtcactgtggtgcctgttgggcctttgctgccgtggaatctctccaggatcgtttctgcattcatctcaacatgagcgtctcactttcggtcaatgacctactggcttgctgtggttttctgtgtggtagcggttgtaatggaggatatcctatcagcgcatggcgctacttccgtcgcagtggtgtcgtcactgaggagtgtgatccatacttcgatcagactggttgccagcatcctggatgcgagccagcttatcctacaccaaaatgtcacaggaaatgcaaggtggagaaccaagtgtggaagaaaaataagcatttcagtgttaacgcgtacagagtacattctaatccccatgacatcatggcagaggtctacaaaaatggccctgtagaagttgctttcaccgtttatgaggactttgcacactacaagtcaggagtatacaagcacatcaccggtggcgtgatgggaggtcacgctgtcaagttgattggttggggaaccagtgatgccggcgaggattactggcttcttgcaaaccagtggaacagaggatggggtgatgacggatacttcaagatcataaggggcaagaatgaatgtggcatcgaagaagatgttactgccggcatgccctcgacaaagaacatggacagaaacaacgatgtcgcctttggaaccgccatactttgagcagcgccttggtcacaaacgcagttgaaattagctgtttgaatgtaaaatgaagcccataaattagctgtttgaatgtaaaatgaagcccataaattatctgtttgaatgtaaaatgaagcccgtaaaatagatttgatggctccaggattctgtactctgtacactagcgcaagcgctgatatgttgttgaaacaacacttgttcagaaacaaaagagaataatgatagtatcaata

SEQ ID NO: 4120 - DNA, 1277 bp, Hordeum vulgare subsp. vulgare
ggcacgagcagctacctcctccgcttgcttcctcctccctcccaccgtgcgtcgccgatcgaggacgaagatggggagcggcctgctcccgctggcgctgctcgtcgtcctctccgccgccgccgccgccccccagctcgccggagcggcagggggaggccattccctaggaatcatccagaaaggcatcatacagacggtcaacaaccatcccaacgccggatggacggctggacacaacccctacctcgccaattacactattgagcaatttaagcatatgctgggagtgaaaccaacacctccaggtttactggctggtgttcgaaccaaaactcatccaaggtcagagcagctcccaaaggagttcgacgccaggtcgaaatggtccggttgcagcacaattgggaaaatacttgatcaaggtcactgcggttcctgttgggcttttggagctgtggagtgtctgcaagatcgtttctgcatccatcacaacatgaacatttcactttctgccaatgacctagtggcttgctgtgggtttatgtgtggtgatggttgtgatggaggatatcctatcagcgcatggcaatacttcgtccagaatggtgttgttactgaggagtgcgatccatactttgatcaggttggctgcaagcatcctggatgcgaacctgcttatcctacacctgtgtgtgaaaagaaatgcaaggtgcagaaccaagtttggcaggaaaagaaacatttcagcatcgatgcataccaagtaaactctgatccacatgacatcatggcagaggtctacaagaatggccctgtagaagttgctttcacagtttatgaggacttcgcacactacaagtcaggagtgtacaagcacatcacaggtggcgtcatgggaggtcatgccgtcaagttgattggttggggaaccagtgatgctggcgaggattactggcttcttgcaaatcagtggaacagaggctggggtgatgacggatacttcaagatcataaggggcaagaatgaatgtggcatcgaagaagatgttacagccggtatgccctcgatgaagaacatcgccggtagcgcctttgcaatgtgaagtttgagcagcgcctcgtcctctgatgcagctggaattagctatttgcctgtcaaattaagcgggcaaactagcattgatggttccaggactatgtattctgtgcactagctatggatgtgcccgttaataacaatgaagcagtttttttttaaaaaaaaaaaaaaaaaaa

SEQ ID NO: 4121 - DNA, 1478 bp, Hordeum vulgare subsp. vulgare
ggatgctcacagctcccccctgttgcagctactcctactcccctgtttaaagggcggcctgggggagaaggaggagcaaggccgccggttgcagccactcccctgtcgccggtcgaggaaggagatgggcggcctactcccgctggcgctgctcgtcgtcctctccgccgctgccgctgcccctcagcttgtcggagctgcgaggggcgaccattccctgccaatcatccaggaagacatcatacggacggtcaacagccatcccaatgccgggtggacggctggacacaacccatacctcgcaaactatactattgagcaatttaagcatatcctgggagtgaagccaacacctccagggttactggctggtgttccaaccaaaacttactcaagatcagaaaaggcggagctcccaaaggagttcgacgccagatctaaatggtctggttgcagcacaattgggaaaatacttgatcaaggtcactgtggtgcctgttgggccttcggtgccgtggaatgtctgcaagatcgtttctgcattcaccacagcgtgaacgtttcactttctgtcaatgatctagtggcttgctgtggatttttgtgtggcgatggttgtgatggaggatatcctatcttcgcatggcaatacttcgtcgagaacggtgttgttactgacgagtgcgatccattctttgatcaggttggttgccagcatcctggatgtgaacctgcttatcctacacctgtgtgtgaaaagaaatgcaaggtgcagaaccaagtttgggaggaaaagaaacatttcagcatcgatgcataccaagtaaactctgatccgcatgacatcatggcagaggtctacaagaatggccctgtagaagtttctttcataatttatgaggactttgcacactacaagtcaggtgtttacaagcaaatcactggtaggatggtgggaggtcatgccgccaaattgattggatggggaacaagtgatgctggcgaggattactggcttcttgcaaatcagtggaacagaggatggggcgatgacgggtacttcaagatcataaggggcacaaatgaatgtggcattgaaggagatgttaatgccggtatgccctcgacaaagaacattgcgggtagggcctttgcaatttgacgtttgggcagcgcctttcctctgatgtagttggaattagctattttcctgtcaaataaagagcctctttgattcaaaggatttttatagaattgaaatcctttgtaatttttcctatgtaggccgtttgattagtagaattgtatcttgtagatttgtcccaaggaattgtttgtactacattccataggaaatctagcatccattctaaattcttgaaaacaatcctttgttttctctatgatgcaatgaaataaacttaaatcatgtaggattcgaaagggtatttttttgaaaaagtgaattttattgattg

SEQ ID NO: 4122 - DNA, 1065 bp, Triticum aestivum
atcatacaaacggtcaacaaccaccccaacgccggatggacggctggacacaacccctacctcgcgaattacactattgagcaatttaagcatatgctgggagtgaagccaacgcctccaggtttacgggctgctgttcgcaccaaaactcattcaagatcggagcagctcccaaaggtgttcgacgccaggtcgaaatggtccggttgcagcacaattgggaaaatacttgatcaaggtcactgtggttcctgctgggcttttggtgccgtggagtgcctgcaagatcgtttctgcatccatcacaacatgaacattacactttctgccaatgacctagtggcttgctgtgggtttatgtgtggcgatggttgtgatggaggatatcctatcagtgcgtggcaatacttcgtccagaatggtgttgttactgacgagtgcgatccatactttgatcaggttggctgcaagcatcctggatgtgaacctgcttatcctacacctgtgtgtgaaaagaaatgcaaggtgcagaaccaagtttgggaggaaaagaaacatttcagcatcaatgcataccaagtaaactctgatccacatgacatcatggcagaggtctacaataatggccctgtagaagttgctttcacagtttatgaggacttcgcacactacaagtcaggagtgtacaagcacatcaccggtggagtcatgggaggtcacgccgtcaagttgattggttggggaactagtgatgctggcgaggattactggcttcttgcaaatcagtggaacagaggctggggcgatgacgggtacttcaagatcataaggggcaagaatgaatgtggcatcgaagaagatgttactgccggtatgccctcgacaaagaacatcgccggtagcgccttcgcaatttaaagtttgagctgccccttctcctctgatgctgttggaattagctatttgcctttcaagtttaagcgggcagattagcattgatggtaccaggaatctgtattctgtgcactagctattaatgtgtccgttaatggtaataaaacaatt

SEQ ID NO: 4123 - DNA, 4792 bp, Triticum aestivum
ggatggtgatgtgtttcactaaacagagcaaatatacgctagccatgtcatgtcgatgccttctaacaaatccccccaaaagaaatccatgggatggttctgctttcactcaacggagcaaatgtacaaaattgcaaaaggattcgctcaaacagaaacatcgaggggcctatttgcaagattttaaaagcgtgatagtaaagggaaaaaacacgggaattgagagtcacatcactacatgcctgtgtacagagaacatgaaattcttcacgcaaggttggatgtgggaaacttcctctgaaatctagtacgaacaaatgaaacgagtcttaagaaggaaaaagaacgtgaccctgacaaaccaaagaacacacgtagggaaaagaaatcataagaattagaatcctttaaaactctcctacaaatcatttcaaccaaagagaccccgaagcaacggcaacgcaaataaagctgatatatactctcgccaaaatacagagagagaataaagctggtatactagtacgttttaaacagcaagccgttgattctggcgtggccgcacccgcgccgttgccggatgctgatgccgcacgccacgcaaggcggagattggccaggaacggaaagggaccgcgcgcgcgtcactcccacggtcatctccatctcatcgaagtagtcacacaggcgtggcgttagggaggccgggaaccaataaaaaaggccgtgtcgggcgaagaggagaatcaaagcgactctcctggtagcagccagctagccagcgactcctgctttgctttgcttcctcgtcgaggaagaggaagaagaagatggggggcgtcggcgtctcccttgcgctgctcgtcgccgtcgtcctctccgccgtcgctgctgccccgcaggttcgcttcttgctcccccgaccgatcccgtcgccgctcgagtcaactctcgaagatccggtttggttgacgtactagcttgcggagataggggaactttgaggatcgccaagcttaatgggccccaaccgtcctcggggaagcaacctcgctgggacccgcagcggaggggcctcccgcagccgaagcgccgtgctggtggagctcgatggcgagccaaccgagggccttttctctgatataagctgatgccaaacgctgaaagaaagtcgaatagctctgaaattcttctaaaaaaagctctgaaatgaaaatctttttttttaatgtttttgtgctgaccttctcaggaaggcatgtcagaacgaatgttttttatggcatttttagttgccgcgacgataacaaattcagctagcaaacacggcaaatcctggcaagaaaaaatgaactgaacggatttgccacgcctacccactaaacttgccatccacggacaacaaaatttgccagacgttcgctagttatgagggttctttttattttgttctttgtgtgcaaataagaacaaaaacccgatcctagcaccgaatagataggatcagcgtgttactcggttagctgaatcacatatatgtttgcttaaaatctctatgtacatgcagctagccggcacagccaaggcagagcattccctaggaatcatccaggtgacttttagtcccactcaaattgacaccatcttcatatctattgtttgtattactcttcatgatatggtgttgtattgtactgtcgcagaaggacatcattcagacggtcaacaagcatcccaatgccgggtggacggctggacacaacccctactttgcaaactacactgtaagcactaaacagcaacaccctcctgttgttctcatcatcaaggcaacattttttccttccttgtattctgacctgaaaatcaccctcttccatgcagattgagcaattcaagcatatcctgggagtgaagccaacgcctccgggtttgctcgctggtgttccgatcaaaattcatccagaaatggatctccccaaggagtttgacgctagaactcaatggtccagttgcagcacaattgggaacatacttggtaggttcaacaagataactcaatgttgacccactttcaagtttcagccagaaattggtttcctgcgtctttttgattactttgactaactccatttcctctctacctttccaatacactggaaaacgcggaatctcatgagcagatcaagtaagaatattcacactaccttaaattgttagctccatgaatgcttactgaatcatgcaagatgctcaaggtattatgtatgtattggttaacaatggcagggtcactgtggtgcctgttgggcctttgctgccgtggaagctctccaggatcgtttctgtattcatctcaacatggtgagtgcatatgaacgacgtacctgctctcagactactttcaaacaggcacgtttagtccttatccttacataacaaagttgctgtttgtactccttgcagagcgtctccctttcggtcaatgacctactggcttgctgtggttttctgtgtggtagcggttgtaatggaggatatcctatcagcgcatggcgctacttccgtcgcagtggcgtcgtcactgaggaggtatatatgatacttttctactttgtaccatttgaatgttccgatcctccaagagcgataagtttctgttatctaataaaatggttggtgtgtggaatgtcaaacagtgcaatgtaaactcaacgtctcagcagttgttaatgcaagatgtactgaaattcttccgtaaatcttacagttgagttaatgcatagatgctatgtggtgtgaaatgctaacagtgtaaatttgaaccaaaacataagggagttatttcctctgttcactattataagatgttctaacttttttctaaattggatgtatgtagacacgttttagtgtgtttgttccactcatttcagtccgtatgtagtccatattgaaatatccaaaatgtcgtataatagtggatggagggagtagtggttagtaggagcatattgtattctacagttttactgattatgtaaactcatcccaagttgctttgagaaaaaaatacatgtgtcttgtttaaagcataggaaatttcttgcagcttaacacgaaacataaaatacatgaaccatcgtcaaaatttccattaatcttcatgaaaattgatcccaatgcacatatgtggcctcctctttcctcgcctaccatggctgaaagttaggatcatgtccacccttggtgctgctttgttcagcttcatcattttgggttttctcctgttccatattaatgtatatttacttaaatagcactttcccatactgtttgctgtataaaattctgcttggcataccattaaactggaaaaaaacactttttggcagtgcgatccatacttcgatcagactggttgccagcatcctggatgcgagccagcttatcctacaccaaaatgtcaaaggaaatgcaaggtggagaaccaagcgtggaaggaaaataagcatttcagtgttaacgcgtacagagtacattctaatccccatgacatcatggcagaggtctacaaaaatggccctgtagaagttgctttcaccgtttatgaggtaacttcagtatttttcctatttctgacttttaacccgaggttctaaaaattgctatttagcagaagtcgtggcggatcctgggttggttgcagttactgaagtaaattattagcaaaagcttagaaacaactaacataggcactctagtgagtaagatgaagcatgcaatgctgttgtacggtgtttcttcagttcgctagtcatttgatatacagctcatatgcttggtgataagatgacaaagaatcaaaaggaagtatcttatttctcgggttactgatttagtactgccaaattttggacttcgcacactacaaatcaggagtatacaagcacatcacaggtggcgtgatgggaggtcatgccgtcaagttgatcggttggggaaccagtgatgctggcgaggattactgggtacattgttgattccccatatcacactatatgttgaacaatgatcaagtcctgatatgttttctttgtcttctgcttttcagcttcttgcaaatcagtggaacagaggctggggtgatgtaagtttgtgacaaattcctcgcattgttaaatgttattaacagagtattgggctgaattaataaagaaatatggtaatgcattgtaggacggatacttcaagatcataaggggcgagaatgaatgtggcatcgaaggcgatgttactgccggtatgccctcgacaaagaacacggccagaaacaatgatgtcgcctttggaacggccatactttgaggagagcacgaacacagttgaaattagctgtttgcatgtcaaatgaagccactaatttaactctgtgggttccatgatactgtattctgtacactagcgcaaacgctgatatgttgttcaaacaacacttgttcagaaacagaaggggtaatatgtcaataaaacataaggtgtcatctcttcaatcattatgtgctatgtttcatttttagtgtgcagagttgatctgtaccacagagatgagctcatgatgaacggtactgtaaaatggaagaatccaagtagagccaccagtgcacatgagctatgatacaaatcggtgaaatctgatagaagtgtcactcaggaaaattattcaatgataagatgtcgtgttggtaacattttatcataagctcactagcattcactcttttgaccaatt

SEQ ID NO: 4124 - DNA, 1342 bp, Zea mays; identical to SEQ ID NO: 1572

SEQ ID NO: 4125 - DNA, 966 bp, Sorghum bicolor
atggcgctgctcccctgtcagcctcacggccacgccaccgaaacttttcgaaaatcccccacaaaatcccagcggccagctccccgaggccccggcaaccgctgcctccgccaccaccgggcgactgctccacctctgccggagagcgcggcgggcggcatgggagcggagtatcccaccttcgaagaggtctccgcggcccgcgtcctcctcctcctcgccgactccacgcccccaccggccctgccttcgcctcctcccacgctcaggtactttcctcgcctgtctcgcgtcatctgctcatcgcaccaccgaattgcacttcatcatcgcaagttaaccgagcctccgttgcggcgcgcttctccgcattacagcgacgagttcttctgctactcgggctcctcatcctcctactccggcgtgtcggcgaggtcgtgcgtctccgactcggcgcagcgcggccgccccgtcgaccccctccgcgtgctctctgtcgtcgcctccctccgccgcctcgaccctaaggtgctcgttgaggccacaagcgcgctgttccataccgacaaagagaagaagcggaagggcgtgtggatcgagatcgacagcggcgatgacgaggatgaccagagcgagaggagcagcgccgtggccagcgaggggagcaccgtcacggccgccgcgtccgcgggctccacggccacgtcggggagatgccgccaggctccgcgggtgggttgtgctgctggtgggactgggaaggggctgaggagggcggacgtgatcatgcagtggttttcacggccgcaagctgggccagccaccgagaatgacatccgcgccgccgtcggcgacaactccggcacgagcaaggcaatacgctggctgctgaagcaggagggcggcttgcggcgtgcaggcactggtggttccctggatccgtatgtttacatggtcgcagactga

SEQ ID NO: 4126 - DNA, 1423 bp, Zea mays
acctttcgccgattccaccggccaccgtgccttcctccaccaccagccgcggcacacccgcggaaccgccgctcgagctcgcgcctgaaccccccaaactctgccaaatttcgccaaatccagccggtcggaccccgcaacacatcgccaaaaccaaccgggccggccgacacaagccgcagcccgtggcgatggacctggcgtcgagcgaccttgcggcgctgggcgcggcggagctggtccgcgtctcggcgtcgatcccgcgcgcggctccccgcaccttcgcgctgctcaccgcctgcctcgtcttcccgctctccttcgccgtgctcgcgcactccctcttcacccaccccatcctgctccgcatccagcgcgccacccactccgagctagcgcagtggctcaggctcttcgcctaccagttcctctacctcatcgtcctcttcaccttctccctcctctccaccgccgccgccgtcttcaccgtcgcctccctctacgccaacaagcccgcgtccatctcctcctcgctcaccgcgctgccccccatcctgccccgcctcctccgcaccttcctctgggtctcccttctcatgctcgcctaccacctcgtcttcgcgctcaccgtcctcctgctcatcgtcgtcttcatccccaacgcgtccgagtccgagtccgcgccgccctccctcgccttcgtactcttcctcgtcgtcgtcgtcttcgtcttcctcgggatccacgtctacatctccgcgctgtggcacctcgccagcgtcatctccgtgctcgagccgctctgcggactcgccgccatggccaagagcaaggatctgctccagggccgcaccggcaccgcagccacgcttgtcgtctcctacttcgcggtctgcggcgtcacctccgtgctgttccgtgccgccgtcgttaaggggcgcgccgaggaggggagcttcggtctggccttgcccgggcggctgcttgtcggcgccgtgctgctgtgcgttcttgtctgtgtcaatttgctgggactgctcgtgcagagcgtcttctactacgcctgcaaggccttccacaaccagcagattgaccggactgcgttgtatgagcaccttggagggtaccttggggagtacgtgccactcaagagcaatatccagatggagaacctttgagattggagcataggacaagggtaagttactcacctcattgcttcatactagcagtttcatgtggatctttatcagaatatgagtatggcttacaaggggctatctggtcttgttgattctagtaccatgtagtagtttataatctgtataagtggtaatgcacagtatggaaccaatctgtggaatggaagtatggaacagagatgcatgaacaaggttgcctttaaataaaaaaaaaaaaaaaa

SEQ ID NO: 4127 - DNA, 1496 bp, Sorghum bicolor
gcactcactcgacacgcggttcgccacggccattccacggcggatcccccacccaacttctgctgcgcgcagcgccgcggcccccctttcctagccccgattccaccggccgagccttcctccaccaccagccgcggcatacccgcggacccgcctcgcgctcgcgcgtgaacccccccgaactccgccaaattcccccaaacccgggccgcaagtcctcgccaaatcgcccccaaatcaaccggagccgaggccgacacaaagccgcgcaagcgcaacccgcggcgatggagctggcgtcgacggacctcgcagcgctgggcgcggcggacctggtgcgcgtctcggcgtcgatcccgcgcgcggctccgcgcaccttcgcgctgctcaccgcctgcctcgtcttcccgctctccttcgccgtgctggcgcactccctcttcacccaccccatcctgcgccgcatccagggcgccacccacaacgagctcgcgcagtggctcaggctcttcgcctaccagttcctctacctcatcgtcctcttcaccttctccctcctctccaccgccgccgccgtcttcaccgtcgcctcgctctacgccgccaagccggcctccatctccgcctcgctcaccgcgctgccccccatcctgccccgcctcctccgcactttcctctgggtctccctcctcatgcttgcctaccacctcgtcttcgcgctcaccgtcctcctgctcctcatcgtcttcatccccaacgcgtccgagtccgccgcgccgccctccctctccttcgtcctcttcctcatcgtcgtcgtcttcgtcttcctcgggatccacgtctacatctccgcgctgtggcacctcgccagcgtcatctccgtgctcgagccgctctgcgggctcgccgccatggccaagagcaagcagctgctccagggccgcaccggcactgcggccacgctcgtcgtctcctacttcgcggtctgcggcgtcacctcgttgctattccgtgctgctgtcgttaaggggcgcgccgaggaggggagctttggcctggccttgcccggtcgcctgcttgtcggcgccgtgctggtgtgcgttcttgtctgtgtcaatttgctgggactgctcgtgcagagcgtcttctactacgcctgcaaggccttccacaaccagcagattgaccggactgcattgtatgagcaccttggagggtatcttggggagtacgtgccactcaagagcaatatccagatggagaacctttgagattggagcatagggcaagggtaagctgctcacctcattgcttcatactagctgtttcctgtggatctttctcaaaacatgagtatggtttacaaggagctatctggtcttgttatttctagtaccctgtagtagtttataatctgtataagttaaaatgcgcagtatggaaccaatctatatggaatggaacagagatgcatgaacaaggttgcctttagtctc

SEQ ID NO: 4128 - DNA, 1215 bp, Zea mays
gcaaatcgccccccaaaccaaccgggccggccgacacaagcagcatcccgtcggcggcgatggacctggtgtcgagcgacctcgcggcgctgggcgcggtggagctggtccgcgtctcggcgtcgatcccgcgcgcggctccgcgcaccttcgcgctgctcaccgcctgcctcgtcttcccgctctccttcgccgtgctcgcgcactccctcttcacccaccccatcctgctccgcatccggggcgccgcccactcggggttcgcgccgtggctcggcctcttcgcgtaccagttcatgtacctcatcgtcctcttcaccttctccctcctctccaccgccgccgccgtcttcaccgtcgcctccctctacgccgggaagcccgcgtccgtctcctcctcgctcagcgcgctgcgccccatcctgccccgcctcctccgcaccttcctctgggtctccctcctcatgctcgcctaccacctcgccttcgcgctcgccgtcctcctgctcgtcgtcctcgtcttcctcgggatccacgtctacatctccgcgctgtggcacctcgccagcgtcgtctccgtgctcgagccgctctgcgggctcgccgccatggccaagagcaggcagctgctccagggccgcaccggcaccgcagccacgcttgtcgtctcctacttcgcggtctgcggcgcgacctcgctgctgttccgtgccgctgtcgttaagggacgcaccgaggaggggagcttcggcctggccttgcctggccggctgcttgtcggcgccgtgctggtgtgcgttcttgtctctgtcaatctgctaggactgctcgtgcagagtgtcttytactacgcctgcaaggccttccacagccagcagattgaccgcactgcattgtatgagcaccttggaggctaccttggggagtacgtgccactcaagagcaatatccagatggagaacctttgagagttggagcataggacaagggtaatcttctcacctctcattgctacatactagcagttttctatggatctttctcaaaagatgactatggtttacttggagctatctggtcttgttgtttctagtatcctgtagtagtgtagtttagaatctgtacaagtgaaaatgcgcagtatggaaccaatctatggaatggaacgtagatgcatgaacaaggttgtctttcgtctcaaaaaaaaaaaaaaaa

SEQ ID NO: 4129 - DNA, 1628 bp, Oryza sativa Japonica Group
catcgttatggcccaaccacattgacaacacgcggcacacgctgcgtccaggccgatccggtgttgccgaacagcctgctcgtgtcgccgccgcgcgagtacaaaacacgctcggcacgccacgcgggggcggcacgagctttccacggtggattccccccatccatccctctcgcccgagttccctgcctcgccgtccctcctctcatcttgctttccccttcttcgcccacgcggccgcggccaaagcccaccgaccgtgcctgccttccccctaccacatcaccgccgcggcgtccacccgaatcccccctcccacaagacgaccgaagaaaaacgggcaatcgccaaatccccgtgaaaccccaaagcggccgcaccgcgggccgagccgccgaggcgatggagcttgcgacgcacgacctcgcggcgctgggcgcggccgacctcgtccgcgtctccgcctcgatcccgcgcgcggcgccgcgcaccttcgcgctgctcaccgcgggcctcgtcttcccgctctccgccgcggtgctcgtccactccctcttcacccaccccatcatcctccgcctccagggcgccaacggcgactactcctcctccgactccgcccagtggctcaagctcttcgcgtaccagttcctctacctcatcctcctcttcaccctctccctcctctccaccgccgccgccgtcttcaccgtcgcctcgctctacgccgccaagccggcatccatcgcctcctcgctcgccgcgctgccgcccatcctcccgcgcctcctccgcaccttcctctgggtctcgctcctcatgctcgcctaccacctcgtcttcgccctcaccgtcctcctcctcctcctgctcttcgccccatcttcctccccgccctccctccccttcgtcctcatccttgtcgtcgtcgtgttcgtcttcctcgcgatccatgtctacatctccgcattgtggcacctcgccagcgtcatctccgtgctcgagccgctctgcggtctcgccgccatgacaaaaagcaagcaactgcttcaagggcgcacccgcacggccggcgtgctcgtcgtctcctacttcgccgcctgcggcgttaccgctgtgctgttccgcgcggccgtagtcaagggccgcggcgaggaggggagccttggcctgagcttgcccggtcgggtgcttgctggtgctgtgctggtgtctgttcttgtctgcgtcaatttgctggggctactcgtgcagagcgtgttttactacgcttgcaaggccttccacaaccagcagattgatcgaagcgcattgtatgagcatctcggagggtaccttggtgaatacgtgcctctcaagagcaatattcagatggagaaccttgatgcataaagggtaagaactgctggatcttgctctaaagaagagagtaggatttgttttgtgctcttctatctagttcactatgatgctttgtaatctgtaagtagtaataatatggaatggtctatgcaatggaacagagatgcataaggaaaattctctttcttttgcattattgtgtctctgtttacattattttcctgtcattcatgactaatttatgatatacgggtttcttttcctct

SEQ ID NO: 4130 - DNA, 1245 bp, Hordeum vulgare subsp. vulgare
ggagtccaaatcaaatcgatcgccggatcccccctccctccccaccaccatggagctggcgacgcgcgatctcgcggcgctgggcgcgggggacctggtgcgggcctccgccgcgatcccgcgcgccgcgccgcgcaccttcgcgctgctcacggcctgcctcgtcttcccgctctccttcgccgtgctcgcgcactccctcttcacccaccccatcctccgccgcatccggacctccgactacaccgccacctccgcccagtgggtcgccctcttcgcctaccagttcctctacctcatcttcctcttcaccttctcgctcctctccaccgccgccgccgtcttcaccgtcgcctccctctacgccgccaagccggcctccatctcctcatccctctccgcgctgccgcccatcctgccccgcctcctccgcaccttcctctgggtctcgctcctcatgctcgcctaccacgtcggcttcgtcctcaccgtcgtcctcctcatcgtcctcatcggcccgcccgtcaccgcctccaccccgcctccgctctccttgctcctcgccctcctcgccgtcgcattcctcttcctcgccatccacgtctacatctccgcgctctggcacctcgccagcgtcatctccgtgctcgagccggtatgcggcctcgccgccatgtccaagagcaggcagctccttcagggccgcacccgcacggcctccgtcctcgttttctcctacttcgccgtctgcggcctcatcacggcgctcttccgttcagctgtcgtcaaggggcaaggcgaggaggggagcctcgacatgagcttggccgggagaatacttatcggcgctctgctggtctctgtcctcgtctgcgtcaatctgctgggactgctcgtccagagcgtcttctactacgcctgcaaggcctaccacaaccagcagatcgacaggaccgcgctctacgagcacctcgggggctaccttggcgagtacgtgccgctcaagagcaatatccagatggagaacctgtgagactcgtaagctgctcacttgcctgctccttactactagctgtgctgttggatcctgctctaaacaagagcatggcgttgctaggatttgtttagttttcttgtttctagtttgttgtgcttgtctgttgtaatctgtgattaataatgcgctgtatggactgatctgtggtatcaaacagagatgcataaagaaagttctcattctgctgc

SEQ ID NO: 4131 - DNA, 972 bp, Sorghum bicolor
atggagctggtgtcgagcgaagacctcgcggcgatgggcgcggcggagctggtccgcgtctcggcgtcgatcccgcgcgcggctccccgcaccttcgcgctgctcaccgcctgcctcgtctggccgctctccatcgccgtgctcgcgcacaccctcttcaccgaccctttggacatcctgctccgcatccatcatgcgcagtggctcaggctctgggcctaccagttcctctacctcgtggccctctacaccttctccatcctctccaccgccgccgccgtcttcaccgtcgcctcgctctacgccaacaagcagccggcgtccatgtcctcctcgctcaccgccatgccgctcatcctgcctcgcctcctccacactttcgcctgtgtccccctcctcatgggcgcctaccacctcgtcttcgtgctcaccgtcttcggcctcatcaacgtctgcttcgtccccaacaacgacgacgcgcccgacgagtcaccaccgctgcccctcccctttctcctatgcaacatcgtcgtcgccgccgtcttcgtcgggatccacgactacgtctccgcgctgtggcacctcgccggcgtcgtctccgtggtcgagccgctctgcgggctcgcggcactggccaagagcaagcggctgctccagggccgcaccggcaccgcaaccacgctcgtcggagcctacatgacgatctgcggcgtcaccttgctgctgtttcgtgacgctgtcgttgaggggagcttcggcttggccttgccatggcggctccttgtcggcgccgcgctggtgtgcgttcttgtgtgtgccaatctgctgggactgctcgtgcagagcgtcttctactactcctgcaaggccttccacaaccagaagattgaccggactgaattgtatgagcaccttggagggtaccttggggagacactcaagagcaatatcctccagatggagaacctttga

SEQ ID NO: 4132 - DNA, 1002 bp, Sorghum bicolor
ccgcgtccgagggttgcagccctccgcatccgccggaccccaccgggaatggcggcgtgaggaggtccccgtacttactagggttcttcggcccgggaggccaaggggacacctggttggactttggagcgaggggcccgccatggcgaccgacgtgcccatgaccccggagctcgagcagatcgacggagagatccacgacatcttccgcgccctccaaaatggattccaaaagatggataagattaaagattcaaataggcaagctaaacagttggaagatcttactgtgaaaatgaaggagtgcaagcgcttgatcaaagagtttgatcgcattctcaaagacgaggagtcaaataatccacctgagatcaacaagcagctaaatgatagaaaacagttcatgatcaaagagttgaattcctatgtcaccttgaggaaaacatatcaaagtagccttggtaacaacaataagagggttgagctcttcgatatgggtgctggaagtagtgagcctgctgttgaggacaatattcaaatggcatcagccatgacaaatcaacaactcattgatgctggaaggaaccaaatggaccaaacagatcaagctattgaacgttcaaaaatggttgtagcacaaactgttgagactggagctcaaactgctgctacattaacagcgcaaacagagcaaatgaagagaattggtaatgagctagatactgtccacttttcactgaagaaagctagcaaactagtgaaagagattggtcgccaggtagcgactgacaaatgtatcatggcattcctctttcttatcgttgtgggtgtgattgctatcattgttgttaagatcgtccatccgaataacaaaaacatccgagacattccaggactggctccgcctgctcaaaactaccagaacaggagattattgtgggcagaagctttcataggtccgtgatgactgtaaatgtaggcttcatgcaggcaggtgcactg

SEQ ID NO: 4133 - DNA, 1268 bp, Zea mays
cccaactgctcctcttcctcgtcgtcttcctctccgtccccgtccccgtccccctctcggcctccccctccactagccccaaatcctccgtctcctcctgtccctctccgcatccaccggaccccaccgggaatggcggtttgagtaagttcccgtaccagggttcttcggtctgggaggccgaggggacaccgggtcggagtgaggggccgccatggcgagcgacgtgcccatgaccccggagctcgagcagatcgacggagagatccacgatatcttccgcgccctccaaaatggattccaaaagatggataagattaaagattcaaataggcaagctaagcaattggaagatcttactgtgaaaatgaaggagtgcaagcgcttgatcaaagagtttgatcgcattctcaaagatgaggagtcaaataatccacctgagatcaacaagcagctaaatgacagaaaacagttcatgatcaaagagttgaattcctatgtcaccttgaggaaaacataccaaagtagccttggtaacaacaataagagggttgagctctttgatatgggtgctggaagtagtgagcctgctgctgaggacaatattcaaatggcatcagccatgacaaatcaacaactcattgatacgggaaggaaccaaatggaccaaacagatcaagctattgaacgttcaaaaatggtcgtagcacaaactgttgagactggagctcaaactgctgcgacattaacacagcaaacagagcaaatgaagagaattggtaatgagctagatactgtccacttctcactgaagaaagctagccaactagtgaaggagattggtcgccaggttgcgactgacaaatgtatcatggcattcctcttcctgatcgttttgggtgtgattgctatcattgttgtcaagatcgtccatccgaataacaaaaacattcgagacattccagggctggccccgcctgctcaaaactatcagattcacaacaggagattgttgtgggcagaagcttccataggcatgtgatggctctgaatgtaggcttcatgtggacgcactgcctgcgaagcagcagctatccatagggcgaaagatacatagtaacaattctttgtgcctgtatatctattttgtcttgttaactccgagccctaggtctgtattcctgcgtctggtgtttgtacaccgctggccgtttggctgtgtatatggtacagagatgagatcttaaaaccaaaccagtaattatgac

SEQ ID NO: 4134 - DNA, 1247 bp, Oryza sativa Japonica Group
ggagccaagccctaggctcctcctctcctcccaatccccaatccctgttcggcttctccttcctcccctccgcggccgatcgcgatggaaccctgagctacgtggttggtgcttcaccgctggagtagagttctactatagtagggtttgggggcggcggtctcggaggagggaggaagcctttggccatggcgagcgacgtgcccatgagcccggagctcgagcagatcgacggcgaggtccaggacatcttccgcgccctccaaaatggatttcaaaagatggacaagattaaagattcaagtaggcaagctaaacagctggaggatctcacagcaaaaatgaaggagtgcaagcgtttgatcaaagagtttgatcgtatattgaaagatgaggagtcaaacaaccctcctgaggtccacaagcagctaaatgacagaaagcaatatatgatcaaagagttgaattcctatgtcaccttgaggaagacatatcaaagtagcctaggtaataataataagagggttgagctctttgatatgggcgctggaagtagtgaacctgctgccgaggacaacatccaaatagcatcagctatgacaaaccaacaactgatggatgctggaagagaacaaatgactcagactgatcaagctattgaccgttcaaaaatggttgtggcacaaactattgaaactggaacacaaactgcttcagcgctatcacagcaaacagaacaaatgaagagaattggcaatgagctggatactgttcacttttcgttaaagaaggctagccagctggtgaaagagattggccgtcaggttgcaactgacaaatgcattatggcattgctttttctgattgtttgtggtgtgattgcaattattgttgttaagattgtcaacccacataacaagaacatccgcgacatcccaggacttgctccgcctgctcaaaatttccagattagtaacaggagactgctgtcggtagaaattatcagaggtctatgatgactgtgcttgcaagttccatgcaggcggagttcagttcgtttcttcagagtagcttaattgcggtcataagatactacgacatgctgtaaaattcttagtgcctgtatattttattccctggtgtattagatatgaagtcagtagattcccgcgtctgatgcttgtatactccccggccttttggttgtgtgcataaatgcattatagagatgagatcttttaccagtc

SEQ ID NO: 4135 - DNA, 986 bp, Oryza sativa Japonica Group
ttcaccgctggagtagagttctactatagtagggtttgggggcggcggtctcggaggagggaggaagcctttggccatggcgagcgacgtgcccatgagcccggagctcgagcagatcgacggcgaggtccaggacatcttccgcgccctccaaaatggatttcaaaagatggacaagattaaagattcaagtaggcaagctaaacagctggaggatctcacagcaaaaatgaaggagtgcaagcgtttgatcaaagagtttgatcgtatattgaaagatgaggagtcaaacaaccctcctgaggtccacaagcagctaaatgacagaaagcaatatatgatcaaagagttgaattcctatgtcaccttgaggaagacatatcaaagtagcctaggtaataataataagagggttgagctctttgatatgggcgctggaagtagtgaacctgctgccgaggacaacatccaaatagcatcagctatgacaaaccaacaactgatggatgctggaagagaacaaatgactcagactgatcaagctattgaccgttcaaaaatggttgtggcacaaactattgaaactggaacacaaactgcttcagcgctatcacagcaaacggaacgaatgaagagaattggcaatgagctggatactgttcacttttcgttaaagaaggctagccagctggtgaaagagattggccgtcaggttgcaactgacaaatgcattatggcattgctttttctgattgtttgtggtgtgattgcaattattgttgttaagattgtcaacccacataacaagaacatccgcgacatcccaggacttgctccgcctgctcaaaatttccagattagtaacaggagactgctgtcggtagaaattatcagaggtctatgatgactgtgcttgcaagttccatgcaggcggagttcagttcgtttcttcagagtagcttaattgcggtcataagatactacga

SEQ ID NO: 4136 - DNA, 1291 bp, Sorghum bicolor
gctttcctttcctttcctctcaacgccagccacgccgagaggagagagaccaaccgccgccaccggaatggcggggtgaggaagccgcgccggacacgacagaggaacctccgccgccgccgcggcgaccaacagacaccgggtagaggaagggatccagccagccagcgagccatggggagcgacgtgcccatgagccccgagctcgagcaggtggacggcgagatccaggacatcttccgcgcgctccagaatgggttccagaagatggacaagatcaaggactccagcaggcagtccaagcagctggaggatctcaccgccaagatgagagagtgcaagcgtttgatcaaagaatttgaccgtatactcaaggatgaggagaaaaagaacactcctgatgtcaacaagcagctcaatgacaagaagcagttcatgatcaaagaactcaactcctatgtaaccttgaggaaaacgtaccagagcagcctcggtaataagaggatcgaactattcgatactggtaatgaccaagtggctgacgaaactccagttcaaatggcatcagaaatgtcaaatcaagaactcattagcgctggaaggaaacaaatggaccaaactgaccaagccattgagcgctcaaaaatggttgttgcacaaactgttgaagttggagctcagactgctgcaactctgtcacagcaaacagatcaaatgaagagaataggcaatgagctagattctgtccacttttcactgaagaaggctagccaaatggtgaaagagattggccgccaggttgctactgacaaatgcattatggcgttcctgtttcttattgtctgtggtgttattgcaataattgtcgtcaagattgtcaacccacataacaagaacatcagagacattccggggctggcacctcccgccatgaacaggaagctgctgtccgtcgatgctttcggagggctccgagcgctgtgaatggctgccccctgcagtacatcagagttctcctgtgagccacacgatacatgattttgcgattattttgtgcttgtatattgtctcatgttgtttacgcctgcccattctttccctattgcgttggtgagtagtaggttcaggtttctagcggcactcttgttgtttattgcttgcgagcactggctttctggttgtctgtgtatacgcggtagtgatgtgaatgtgagaattgaaattcttcatggttcattcttgtgagttgtgactcaggtttgtgagcttgtggtgaaggttctcacttctc

SEQ ID NO: 4137 - DNA, 1266 bp, Zea mays
accaaacaaactgaaccactgtccgctgcgtgctttccttcctctcaacgccagccttgccgagagcccgagaccaatcgccgccatctcccggaatgacggggtgacgaaaccgcgccgcaccagacaagacagaggagccgccgccgcgacccacaggccaccgggtcgccgaggaggggatccagcgagccatgtcgaccgacgtgcccatgagccccgagctcgagcaggtggacggcgagatccaggacatcttccgcgcgctccagaatgggttccagaagatggacaagatcaaggactccagcaggcagtccaagcagctggaggatctcacggccaagatgagagagtgcaagcgcttgatcaaagagtttgaccgtatactcaaggatgaggagaaaaagaacacccctgatgtcaacaagcagctcaatgacaagaagcagttcatgatcaaagaactcaactcctatgtgaccttaaggaaaacgtaccagagcagccttggtaataagaggatcgaactattcgatacgggtaatgaccaggtggctgagggaactccagttcaaatggcatcagaaatgtcaaatcaagaactcattagcaccggaaggaaacaaatggaccaaactgatcaagctattgagcgctcaaaaatggttgtagcacaaactgttgaagttggagctcagactgctgcaactctgacacagcaaacggaacaaatgaagaggataggcaatgagctagattctgtccacttttcactgaagaaggctagtcaaatggtgaaagagattggccgtcaggttgctactgacaaatgcattatggcgttcctgtttctgattgtctgtggtgtcattgcaataattgttgttaagattgtcaacccgcataacaagaacatcagagacattccgggcctagcacctcccgccatgaacaggaagctgctgtccatcgacgctgcaggactctgagcgttgtgaatggctgcctcccgcagcacagcgcaacgcagcgcgtcagagttctcttatgagccacgatacatggcttcgcgattcttttgtgcttgtagtttacgtccgcccattctttccctattgcattggtgagtagtagcctcaggtttgtagcgggactcttgttgtttattgcttgcgagcccatagctttctggttgtttgtgtatatgcggtagtgatgtgaatgtgagagtcgagtggagattcttcaaaaaaaaaaaaaaaa

SEQ ID NO: 4138 - DNA, 1204 bp, Oryza sativa Japonica Group
gctcaccggaatgcggcggtgacgagacgaccaaccacctcctgcgactgctcggatctcgcgacgcggcggcggcggcgagatacggagatccggcagcttgaggcaagagagagagaaagccatggcgagcgacgtgcccatgagccccgagctggagcaggtggacggcgagatccaggacatcttccgcgcgctccagaatgggttccagaagatggacaagatcaaggactccaacaggcagtccaagcagctggaagatctcaccgggaagatgagggagtgcaagcgcttaatcaaagaatttgatcgtattctcaaagaggatgagaaaaagaactcggctgatgtcaacaagcagctaaatgataagaagcagctgatgatcaaagaattgaattcctatgtcacattgaggaaaacgtaccaaagcagcctgggtaataagaggattgaactatttgatactggtaatgatcaggtggccgaggacaacactgttcaaatggcatcagaaatgtcaaatcaacaactcatggatgccggaaggaaacagatggaccaaacagatcaagttattgagcgttcgaaaaaggttgttgcacaaaccgttgaagttggatctcaaactgctgcagctctatcacaacaaacagaacaaatgaagagaattggcaatgagctagactcggttcacttttcactgaagaaggctagccaaatggtgaaagagattggtcgccaggttgcaactgacaaatgcatcatggcattcctatttctgatagtctgtggtgtgattgcaatcattgttgttaagattgtcaaccctcacaacaagaacatcagagacatcccaggactggcaccacctgcgcagaacaggaagctcttgtccatagaatctttcggaagcctctgagcattgcgagtgggaggcaaccgagatgtttgggagaagatactatgcacgtcgtgacaattcttttgcgcttgtatatcatctcatgtcgttattcccttccactgatctattcttttcttgctgtaattggtcattagtgttggatttacgtttgatggttgcagtgcggcttcctgttggctttatgaatgtgtgtatatgtggtagtgatgaggatacaaagatatttgttgttctttttattctgcaagtaatcacgtgaaggcttcagtttgc

SEQ ID NO: 4139 - DNA, 921 bp, Oryza sativa Japonica Group
tgacgagacgaccaaccacctcctgcgactgctcggatctcgcgacgcggcggcggcggcgagatacggagatccggcagcgtgaggcaagagagagagaaagccatggcgagcgacgtgcccatgggccccgagctggagcaggtggacggcgagatccaggacatcttccgcgcgctccagaatgggttccagaagatggacaagatcaaggactccaacaggcagtccaagcagctggaagatctcaccgggaagatgagggagtgcaagcgcttaatcaaagaatttgatcgtattctcaaagaggatgagaaaaagaactcggctgatgtcaacaagcagctaaatgataagaagcagctgatgatcaaagaattgaattcctatgtcacattgaggaaaacgtaccaaagcagcctgggtaataagaggattgaactatttgatactggtaatgatcaggtggccgaggacaacactgttcaaatggcatcagaaatgtcaaatcaacaactcatggatgccggaaggaaacagatggaccaaacagatcaagttattgagcgttcgaaaaaggttgttgcacaaaccgttgaagttggatctcaaactgctgcagctctatcacaacaaacagaacaaatgaagagaattggcaatgagctagactcggttcacttttcactgaaaaaggctagccaaatggtgaaagagattggtcgccaggttgcaactgacaaatgcatcatggcattcctatttctgatagtctgtggtgtgattgcaatcattgttgttaagattgtcaaccctcacaacaagaacatcagagacatcccaggactggcaccacctgcgcagaacaggaagctcttgtccatagaatctttcggaagcctctgagcattgcgagtggga

SEQ ID NO: 4140 - DNA, 1475 bp, Oryza sativa Japonica Group
ctcccacatccatcctcttgttaattgacttgttcatttttgcaagctgtaggtctggagagtggagaggaagaggaatcctcctcagtcctcaccttcagatttcagaacacaggcaatcggccctagctgcaatccaacaagatgggcatgcctctgctgctgctgctgctgatcctcgtcgctgctggcccccaggcaggcagagctgcaaagccaatcccaaatctccagctcatgaccaaggagggcggcagttcaagaatcatccaggacgacatcataaaggcaatcaacaagcatcccaatgctggctggacggctgcacggaatccatactttgcaaactatactactgcgcaattcaaacatatccttggagtgaagccaacaccgcatagtgtgctaaatgatgtccctgtcaaaacttatccaagatcgctgatgcttccaaaggagtttgatgccaggtctgcatggtcacagtgtaacacaattgggaccatacttgatcagggtcactgtggctcgtgttgggcatttggtgctgtggagtgtctccaggatcgtttctgcattcatttcaacatgaacatttcgctatctgtcaatgacctagtggcatgctgcggtttcatgtgcggcgatggttgtgatggaggctatcctatcatggcatggcgctactttgttcggaatggtgttgttaccgatgagtgcgatccatactttgatcaggtcggttgtaagcatccaggatgcgaacctgcttatcctacgccagtgtgcgagaagaaatgcaaggtgcagaaccaagtttggctggaaaagaagcatttcagtgtcaatgcatacagagtaaattctgatccacatgacataatggcagaggtctaccaaaatggccctgtagaagttgctttcaccgtttatgaggattttgcacactacaaatcaggagtatacaagcacatcacaggtggcatgatgggtggtcatgctgtcaagttgattggatggggaaccacggatgctggcgaggattactggctgcttgcaaaccagtggaacagaggatggggcgatgatgggtacttcaagatcataaggggcacaaacgaatgtggcatcgaagaagatgttgttgctggtatgccctcgacgaagaacatggtgaggaactatgatagcgccttcggagtcggaacggccatagtttgactttaatcaatgttaatggcctcaaatacggttgggatcatgtaaatttgtcctgggtgatttctggattttgcacacacgggcaggcttctcgagactgatcggagtttaggctacttgtccagaaacacattggaataatatctgaataatagatgtattctctctctctctctctctctctctctctctctctctacgtccggttaactacgggatgtgacgtagaggtgttagggaggagcgcacgttaa

SEQ ID NO: 4141 - DNA, 1259 bp, Hordeum vulgare subsp. vulgare
gactactcccgcctgcttccttgcttgcttgctttgcttccccgtcgaggaggaggaagaagaggatggggggcgtgggcgtctccctcgcgctgctcgccgccgccgccgccgtcgtcatctccgccgtcgctgccgccccgcagctggtcggagcagccaaggcagagcattccctaggaatcatccaggaagacatcattcagacggtcaacgaccatcccaatgccgggtggacggctggacacaacccctactttgcaaactacactattgagcaattcaagcatatcctgggagtgaagccaacgcctccgggcttgctcgctggcgtcccaatcaaaacccatccaaaatcagcagatctcccgaaggagtttgacgctagaactcaatggtctagttgcagcacaatcgggaacatacttgatcaaggtcactgtggtgcctgttgggcctttgctgccgtggaatctctccaggatcgtttctgcattcatctcaacatgagcgtctcactttcggtcaatgacctactggcttgctgtggttttctgtgtggtagcggttgtaatggaggatatcctatcagcgcatggcgctacttccgtcgcagtggtgtcgtcactgaggagtgtgatccatacttcgatcagactggttgccagcatcctggatgcgagccagcttatcctacaccaaaatgtcacaggaaatgcaaggtggagaaccaagtgtggaagaaaaataagcattccagtgttaacgcgtacagagtacattctaatccccatgacatcatggcagaggtctacaaaaatggccctgtagaagttgctttcaccgtttatgaggactttgcacactacaagtcaggagtatacaagcacatcaccggtggcgtgatgggaggtcacgctgtcaagttgattggttggggaaccagtgatgccggcgaggattactggcttcttgcaaaccagtggaacagaggatggggtggtgacggatacttcaagatcataaggggcaagaatgaatgtggcatcgaagaagatgttactgccggcatgccctcgacaaagaacatggacagaaacaacgatgtcgcctttggaaccgccatactttgagcagcgccttggtcacaaacgcagttgaaattagctgtttgaatgtaaaatgaagcccataaattagctgtttgaatgtaaaatgaagcccataaattatctgtttgaatgtaaaatgaagcccat

SEQ ID NO: 4142 - DNA, 2155 bp, Zea mays; identical to SEQ ID NO: 4058

SEQ ID NO: 4143 - DNA, 1350 bp, Zea mays
tagccgtgctccgctcaccttctctcgcgctacagtctcaaggggtagctagccaagctaccaagctcgtcaggaacgagagaaagaggccggcggtgcgcggggatgatgatgatgagcagcggccgggcgggcggcggggccaccgcggggcggtacccgttcacggcgtcgcagtggcaggagctggagcaccaggcgctcatctacaagtgcctggcgtccggcaagcccatcccttcctacctcatgccgccgctccgccgcatcctcgactccgccctcgccacgtcgccgtccctcgcctacccgccgcaaccctcgctgggctggggctgcttcgggatgggcttcacccggaaggccgacgaggacccggagcccgggcggtgccggcgcacggacggcaagaagtggcgctgctccaaggaggcgtacccggactccaagtactgcgagaagcacatgcaccggggcaagaaccgttcaagaaagcctgtggaaatgtccttggccacgccggccccggcgccggcccccgccgccgccacaaccgccaccgccacctcatccccggcgccgtcctaccaccgcccggcccacgacgccacgccgtctccgtaccacgcgctgtatggaggcggcggcggcggcggcggtagcccttactcggcgtcggcacgcccaggagcaaccggaggcggcggcgcgtaccaccacgcgcagcatgtgagccccttccacctccacctcgagaccacccacccgcacccgccgccgccctacaactactccgccgaccagagggactacgcgtacgggcacgcggccgccaaggaggtcggcgagcacgccttcttctcggacggcgcgggcgagcgggtcgaccgccaggccgcggcggggcagtggcagttcaggcagctcggggtggagacgaagccgggccccacgccgctgttccccgtcgccgggtacgggcacggcgcggcgtcgccgtacggcgtcgagctgggcaaggacgacgacgagcaggaggagaggcgccgccagcactgcttcgttcttggagccgacctgcggctggagcggccgtcgtcgggccatggccatggccatggccatgaccatgacgacgccgccgccgcgcagaagccgctccggcccttcttcgacgagtggccgcaccagaagggggacaaggccgggtcgtggatggggctcgacggcgagacgcagctctccatgtccatccccatggccgctaccgacctccccgtcacctcccgcttccgtaacgacgagtgatgccacatcaaacctggcgctggaaactcggaacgtatggtg

SEQ ID NO: 4144 - DNA, 1546 bp, Zea mays
acagtctccagggtagctagccaagctaccaagctcgtcaggagcgagagaaagaggccggcggtgcgcggggatgatgatgatgagcagcggccgggcgggcggcggggccaccgcggggcggtacccgttcacggcgtcgcagtggcaggagctggagcaccaggcgctcatctacaagtgcctggcgtccggcaagcccatcccgtcctacctcatgccgccgctccgccgcatcctcgactccgccctcgccacgtcgccgtccctcgcctacccgccgcaaccctcgctgggctggggctgcttcgggatgggcttcacccggaaggccgacgaggacccggagcccgggcggtgccggcgcacggacggcaagaagtggcgctgctccaaggaggcgtacccggactccaagtactgcgagaagcacatgcaccggggcaagaaccgttcaagaaagcctgtggaaatgtccttggccacgccggccccggcgccggcccccgccgccgccacaaccgccaccgccacctcatccccggcgccgtcctaccaccgcccggcccacgacgccacgccgtctccgtaccacgcgctgtatggaggcggcggcggcggcggtagcccttactcggcgtcggcacgcccaggagcaaccggaggcggcggcgcgtaccaccacgcgcagcatgtgagcccattccacctccacctcgagaccacccacccgcacccgccgccgccctacaactactccgccgaccagagggactacgcgtacgggcacgcggccgccaaggaggtcggcgagcacgccttcttctcggacggcgcgggcgagcgggtcgaccgccaggccgcggcggggcagtggcagttcaggcagctcggggtggagacgaagccgggccccacgccgctgttccccgtcgccgggtacgggcacggcgcggcgtcgccgtacggcgtggagatgggcaagtacgacgacgagcaggaggagaggcgccgccagcactgcttcgttcttggagccggcctgcggctggagcggccgtcgtcgggccatggccatggccatgaccatgacgacgccgccgccgcgcagaagccgctccggcccttcttcgacgagtggccgcaccagaagggggacaaggccggttcgtggatggggctcgacggcgagacgcagctctccatttccatccccatggccgctaccgacctccccgtcacctcccgcttccgtaacgacgagtgatgccacatcaaacctggcgctggaaactcggaacgcatggtgctgatgctgaccatgagatgtaccgtttcgctcaaggccggccgtcatcaccacggccacatcaaaccggtttgaagaacttgggaaggccgaatgaaacctccagaagaatgatctgtcctcttttttctgcatttctttttctcttagtattacgcagtattgcttcgcgtgtaatatgttttcctgtaatatcaagtgagggcgtttctgaaaaacaaaaaaaaaaaaaaaaaa

SEQ ID NO: 4145 - DNA, 1715 bp, Sorghum bicolor
tctccaccctacagcctcgtcccggcacatcaactcgcttacgctaccaccgccagcacacacccaggccgcagcgccgcgctccgttcacctcctcttacgcgcggtgccctaccggcgcgcggtgtctggctagaatcttggtggtcgttcgcaggggtagccaagctatctagctagctcggaaagcggccggccgcgcgcggagatgatgatgatgagcggtcgagcgggcggcggcgccaccgcggggcggtacccgttcacggcgtcgcagtggcaggagctggagcaccaggcgctcatctacaagtgcctggcgtctggcaagcccatcccgtcctacctcatgccgccgctccgccgcatcctcgactccgccctcgccacgtcgccgtccctcgccttcccgccgcaaccctcgttggggtggggctgtttcgggatgggcttcagcaggaagcccgacgaggacccggagcccggccggtgccggcggacggacggcaagaagtggcgctgctccaaggaggcgtacccggactccaagtactgcgagaagcacatgcaccggggcaagaaccgttcaagaaagcctgtggaaatgtccttggccacaccggcgccggcctctgcggtgtcctccgccacaagcgccacagccgccgccgccgccgccaccaccaccacctcgtcgccagcaccgtcctaccgcccagcgcccacctcgcacgacgcctcgccgtaccacgcgctgtacggcggcggcagtccgtactcggcgtcggcgcgtcccgccggtggccccggcccgtaccatcatcccgcgcaggtgagccccttccacctccacctcgagaccacccacccgcacccgccgccgtcctactactccgtagaccagcgggactacgcgtacgggcacgccaccaaggaggtcgtcggcgagcacgccttcttctccgatggcgcggccgagcgggaccgccagcatgccgccggccagtggcagttcaagcagctcgggatggacacgaagccgagccccacgtctctgttccccgtcgccgggtacggcaacggcgctggtgcgtcgccgtacggcgttgatctgggagccaaggaagacgacgaggaagaaaggcggcgccagcagcagcagcactgcttcgttcttggtgccgacctgcggctggagcggccgtcgtcgggccatgacgccgccaccgcgcagaagccgctccggcccttctttgacgagtggccgcacgagaagggaaacaagggtgggtcatggatggggcttgacggcgagacgcagctctccatgtccatccccatggccgccagcgacctccccgtcacctcccgctaccgtaatgatgagtgatggccggaagaaatattttatggttgctacgacctcgaggcgaggccacatcaaacctggagctggaacacgacacgacgcgtggttcttccctatggtgctgaccctgagctgccctcgccgccgttttcctcaaggccggcacggtttgaagaacatggggggaagaactaattaaagctccttaagaacgatctttcctgtttctccgttcatctttctcgtttagtattacgtagtgttgattcgagtgttatgtttccctgtaatatcaactgaagtgcctgatttctcaagctgcgtttgagcttcttcctgtcagtgc

SEQ ID NO: 4146 - DNA, 1878 bp, Oryza sativa Japonica Group
ttacaaaaccccagccaccgagagctctcccgctccactcgccgcacaccaccaccctcacccctccccccatccgcgtgatctcccgagcagctagagcgcgcgcccgcggcgcctgtactgcgagaccgcttcgctcgcttccggtcggtgaagaggcggtcggtcgcagctgaagtagttgttgcagagatgatgatgatgagcggtcgcccgagcggcggcgccggcggaggtcggtacccgttcacggcgtcgcagtggcaggagctggagcaccaggcgctcatctacaagtacatggcgtccgggactcccatcccctccgacctcatcctccccctccgccgcagcttcctcctcgactccgccctcgccacctccccttccctcgccttccctccccaaccttcactggggtggggttgctttggcatggggtttgggcggaaggcggaggacccggagccagggcgatgccggcgtacggacggcaagaagtggcggtgctccaaggaggcgtacccggactccaagtactgcgagaagcacatgcaccgtggcaagaaccgttcaagaaagcctgtggaaatgtccttggccacgccgccgccgccgtcctcctccgccacctccgccgcgtcgaacacctccgccggcgtcgcccccaccaccaccaccacctcctccccggcgccctcctacagccgcccggcgccgcacgacgcggcgccgtaccaggcgctctacggcgggccctacgccgcggccaccgcgcgcacccccgccgccgcggcgtaccacgcgcaggtgagcccgttccacctccagctcgacaccacccacccgcacccgccgccgtcctactactccatggaccacaaggagtacgcgtacgggcacgccaccaaggaggtgcacggcgagcacgccttcttctccgatggcaccgagagggagcaccaccacgccgccgccgggcacggccagtggcagttcaagcagctcggcatggagcccaagcagagcaccacgcctctcttcccgggcgccggctacggccacaccgcggcgtcgccgtacgccattgatctttcaaaagaggacgacgatgagaaagagaggcggcaacagcagcagcagcagcagcagcagcactgcttcctcctgggcgccgacctccgtctggagaagccggcgggccacgaccacgcggcggcggcgcagaaacctctccgccacttcttcgacgagtggccgcatgagaagaacagcaagggctcctggatggggctcgaaggcgagacgcagctgtccatgtccatccccatggccgccaacgacctcccgatcaccaccacctcccgctaccacaatgatgattaatctcttgaagaagccaagaagtgatcaacacgcggaagaaatcaacagcttctttcacggcgtgcgagctgcatgctgatgctccaggatcgatcgatcgatcattgcatctccaaactaatcacgcttcgatctttcaggacttcatcaatgacaggccgaaacctcctacgagttctctgatgatattcttatttttttcccacttcttttcgttgagctttttgtaatgttgcttcgagtgttactcctacattttctccgaaatggcctcagaatgatgcggtcgggctgattaattaggttagactcttcctgaaccaactaggaatagattttctgcctggttcctgtcagtccttgtaatatctgcagcagcttgtgagacaagcgtgttcgcttttgtgaacgccctttttcttctttccgattcctctgcctgtgatagtactcgctccgaaaaaaaaaaaaaaagcaaaccgtggattcttg

SEQ ID NO: 4147 - DNA, 1891 bp, Oryza sativa
ttacaaaaccccagccaccgagagctctcccgctccactcgccgcacaccaccaccctcacccctccccccatccgcgtgatctcccgagcagctagagcgcgcgcccgcggcgcctgtactgcgagaccgcttcgctcgcttccggtcggtgaagaggcggtcggtcgcagctgaagtagttgttgcagagatgatgatgatgagcggtcgcccgagcggcggcgccggcggaggtcggtacccgttcacggcgtcgcagtggcaggagctggagcaccaggcgctcatctacaagtacatggcgtccgggactcccatcccctccgacctcatcctccccctccgccgcagcttcctcctcgactccgccctcgccacctccccttccctcgccttccctccccaaccttcactggggtggggttgctttggcatggggtttgggcggaaggcggaggacccggagccagggcgatgccggcgtacggacggcaagaagtggcggtgctccaaggaggcgtacccggactccaagtactgcgagaagcacatgcaccgtggcaagaaccgttcaagaaagcctgtggaaatgtccttggccacgccgccgccgccgtcctcctccgccacctccgccgcgtcgaactcctccgccggcgtcgcccccaccaccaccaccacctcctccccggcgccctcctacagccgcccggcgccgcacgacgcggcgccgtaccaggcgctctacggcgggccctacgccgcggccaccgcgcgcacccccgccgccgcggcgtaccacgcgcaggtgagcccgttccacctccacatcgacaccacccacccgcacccgccgccgtcctactactccatggaccacaaggagtacgcgtacgggcacgccaccaaggaggtgcacggcgagcacgccttcttctccgatggcaccgagagggagcaccaccacgccgccgccgggcacggccagtggcagttcaagcagctcggcatggagcccaagcagagcaccacgcctctcttcccgggcgccggctacggccacaccgcggcgtcgccgtacgccattgatctttcaaaagaggacgacgatgagaaagagaggcggcaacagcagcagcagcagcagcagcactgcttcctcctgggcgccgacctccgtctggagaagccggcgggccacgaccacgcggcggcggcgcagaaacctctccgccacttcttcgacgagtggccgcatgagaagaacagcaagggctcctggatggggctcgaaggcgagacgcagctgtccatgtccatccccatggccgccaacgacctcccgatcaccaccacctcccgctaccacaatgatgaataatctcttgaagaagccaagaagtgatcaacacgcggaagaaatcaacagcttctttcacggcgtgcgagctgcatgctcatgctccaggatcgatcgatcgatcattgcatctccaaactaatcacgcttcgatctttcaggacttcatcaatgacaggccgaaacctcctacgagttctctgatgatattcttattttttttcccacttcttttcgttgagctttttgtaatgttgcttcgagtgttactcctacattttctccgaaatggcctcagaatgatgcggtcgggctgattaattaggttagactcttcctgaaccaactaggaatagattttctgcctggttcctgtcagtccttgtaatatctgcagcagcttgtgagccaagcgtgttcgcttttgtgaacgccctttttcttctttccgattcctctgcctgtgatagtactcgctccgcgaaaaaaaaaaagagcaaaccgtggattcttgtgtcaaaaaaaaaaa

SEQ ID NO: 4148 - DNA, 1139 bp, Zea mays
gtaggtcgttcgcaggtaggtaaccgtaacctagctagctcgtcgggatgatgatgatgagcggtcgagcggccaccgcggggcggtacccgttcacggcgtcgcagtggcaggagctggagcaccaggcgctcatctacaagtgcctggcgtccggcaagcccatcccgtcctacctcatgccaccgctccgccgcatcctcgactccgccctcgccacgtcgccgtcgctcgccgccttccagccgcaaccctcgctggggtgggggggctgcttcgggatgggcttcagcaggaagcccgccgacgaggacccggagcccgggcggtgccggcgcacggacggcaagaagtggcgctgctccaaggaggcgtacccggactccaagtactgcgagaagcacatgcaccggggcaagaaccgttcaagaaagcctgtggaaatgtccttggccacgccggcgccgccggcctcctccgctgccaccacctcgacgtccccggcgccgtcctaccaccgcccggcccccgccgcgcacgacgccgtgccgtaccacgcgccctacggcgccgcgtaccatcacacgcagacgcaggtgatgagccccttccacctccacctcgagaccacccacccgcacccgccgccgccgccgccctactactacgcggaccagagggactacgcctacggcaaggaggtcggcgagcgcgccttcttctccgacggcgcgggggagagggaccgccagcagcaggccgcggggcagtggcagttcaagcagctcgggacgatggaggcgacgaagccgtgccccacccccacgccgctgctccccgccgccgggtacggcgtcggtcaggccaaggaagacgaggaggaggaaacgcggcggcagcagcagcagcactgcttcgttcttggcgccgacctgcggctggcggagcggccgtcgggggcacatgacgacgccgcgcagaagccgctccggcatttcttcgacgagtggccgcacgagaaagggagcaaggcggggtggtggattgggggactcgacggcgagacgacgcagctctccatgtccatcccgatggcggccgctgccgacctccccgtcacctcccgctaccgtacgtga

SEQ ID NO: 4149 - DNA, 1399 bp, Sorghum bicolor; identical to SEQ ID NO: 4084

SEQ ID NO: 4150 - DNA, 1934 bp, Zea mays; identical to SEQ ID NO: 1574

SEQ ID NO: 4151 - DNA, 2407 bp, Zea mays
caatctatttgtttccgccgccgtgtctgtctcggcccaggcaagccaccgcatgcaccgccgtcgctcacaccgttccagcgcctcgtaccctcactgacgtagtgcgcgctgctccgccaacgcccccagcgacccaaacagactccgacccgcgccgtccgttccgtgtccggcctcgccgccgattctctcggagctcctgccctgccgtgcgggagcacttcttcgaacagatggaggctcgccgcgcgaggccgagcaaccagacgcactccagctgttggacgaatccctcctcctccacgccaggccctgcgtcgcctgaattcctcactacggtccgcggagcagcattttgcggccgtggcttcgcctccgccacagcaaggttgtcgtcatactcctttttatgtgtgaagaaggagaggaggtgcttatcgtagtcagtgacagtggtggatccagcagctcttgtggaaagcggcggaggggagttgacagtaacaacagcaacaaccgcggaagggggtgtgatgcttgcttgcagatgttgctgttatcgccttgggggtgattattctgtcctgtgctctaatgatgctcggaatgatgatggaactccccgtcagtgcgcctggttaatcacaatgaacggaggaagggcaatctcctctgaatccctcgcggcactggcatggcatttcctgctaaggcgtcgcagcagggacggtgccacagctctcgcatcttcatccggggtgcttcaaatcgcagaggacaaatcatctgcggccaacttgacaaagcacaaggtgagtgcagaaaggaagctcctcaacgacgctcttgacagaactggtgtgcgatatgagactgagagctggatggatgaagagacatcgtcctggatggacagggatctcacggacagcgatttgcggtaccgcttgctaatgcagaacctcgaggaactggagaccagcttggttggtaaagacctggagatggacatccttgagcagcttggggctctgggatcgttcaacgcttctgtggccaggggtgtctcggcgttacatggtcgaccagatggctctctgcttgatgatccggagccggagacgactcctctggatgcggggcaagaagacagccaagtggtcgtcgtccggagtggcaagagccaggagaggaagctgagaaggatgagagcatcatcagatgagaaaggatccaggacctcggtgaaggtgaacccaccacgaagacccaagaaatcccgtaaggcgagtagcagccagtttatatccgagtggaaaagtcacccaggccaaaggaggatcattgtgcgtgagcaatcagcactgctgtccaccatcaaggaatgtgcaggtcttgagaagataagggagaagatggtgaaggaagggcaggaggtgagctaccacaggtgggcggaggcagctggggtggacgaggcagagctggtgagcaggctgcaggcaggttactgctgccgggacaggctactggtgaccaccgagtggctggtcaggtgcatcgcgagaacatacaccggcatggggacggccttggacgatctgcttcaggctgggaagatgggcgttcttgacggcgccgagaagttcgacagccggaaggggtgcaggttctccacgtacgtcaagtactggatcaggaaagggatgctcgctctgctggctgaaaactcaggagtcaccctgctgcctgcaagaatggagagcatcatgcgcaaggtgaaggaggcgcggcgtgggatccggtacaggcagggcaggaacccgtcggactcagaggttgccgccgccgtgggcgtgtcggtagccaacgtgaggctggcgcgcaagtgctctcgcagggccgtctcgctctactcggaggtcgcgatcggacaggacgtcaagttcgcggaggtgatcccggacgagtcggcgtctccggacgaggcggcgctgttccggggccagctgagggagcggctgctgctggtgctgggcaggctgcccgcgcgggaaggacgcgtgctgcggctgcggcacgggctggaggacgggcggtgcaggtcgctggaggagatcggcggcatctacggcgtctccaaggagtggatcaggaagatcgagaagtcggccatggccaggctccgggacgacgacgccgtgcgccgcgacctccacgacttcgtctagtctgtctgcagtgcactagaacaatttgttagctggtagggaacgatgtcatgtacgtagtaccatactatctatcagcagactgaaattgaagctgctattcacacgaaatatacaatgatagagatttgtgattcatgacggttataatgtcatgcttgctttcatgtttc

SEQ ID NO: 4152 - DNA, 1590 bp, Sorghum bicolor
atgcatctcctgctaaaacgtcgcagagaccgcagcagcagggacattgcatcttcatccggcgtcctccaaatcacagagaacaaatcagccgcggccaacttaacaaaacacaagcaggtgatgagtgcagaaaggaagctccttgatgacgctcttgacagaactagtgttcagtatgagagctggatggatgaagagacatcgttctggatggacagggataacacgaacaacaattttcagtacggtttgttaatgcagaaccttgaggaattggagacgagtttggctggtaaagacttgaagattctggaaaatgacatccttgcacacattcagcagcttggagctctgagatcgttcgatgcgtctacggccgtgggcgccaccctgctagacaccctaacacatgatcaaccagacagctctctgcttgaccaacaaatcatcgagtttgatccagagacgactcctctggacgaggaggagcaagaagatagccaagtagtcgtcgtccggagtggcaagagtgaggagaggaagctgaagagagtcagagcgtcagagaaaggatccaggatctcagtgaaagtgaatccacgaagacccaagaaatcatcccggaaggcgagtagcagccagtttatatccgagtggaaaagtcacccaggacgaaggaggatcattgtgcgtgagcaatcagcactgctagcgaccatcaaggaatgcgcaagccttgagaagattagggagaagatggtgaaggaagggcaggaggtgagctaccacaggtgggcagaggcagctggaatggacgaggcagagctgatgagcaggctgcagacaggctactgctgccgggagaggctgctggtgaccaccgagtggctggtcaggtgcatcgcaagatcatacaccggcatggggacggccttggacgatctgcttcaggctgggaagatgggcgttcttgacggcgccgagaagttcgacacccggaaggggtgcaggttctccacgtacgtcaagtactggatcaggaaagggatgctcgctctcctcgctgaaaactcaggagtcaccctgctgcctgcaagaatggagagcatcatgcgcaaggtgaaggaggcgcggcgtgggatcaggtacagcgagggcaggaacccgtcggactcggaggtggccgcggccgtcggcgtgtcggtggccaacgtgaggctggcgcgcaagtgctcccgcaggcccgtctcgctctactcggagatcgggatcgggcagcacgccaagttcgcggaggtgatcccggacgaggcggcggcggccgcggaggcgcccgacgaggcggcgctgttccggggccagctgagggagcggctgctgctggtgctgggcaggctgccggcgcgggagggacacgtgctgaggctccgacacgggctggaggacggccggtgcaggtcgctggaggagatcggcggcatgtaccgcgtgtccaaggagtggatcaggaagatcgagaagtcggccatggccaggctcagggacgacgacgacgtgcgtcgcgacctccacgacttcgtctgctga

SEQ ID NO: 4153 - DNA, 2165 bp, Zea mays; identical to SEQ ID NO: 1116

SEQ ID NO: 4154 - DNA, 1916 bp, Hordeum vulgare subsp. vulgare
gaagcacacacgcaaaaggcagaagcagaccacctgcagaccaggaagaggccggaggagcgagctcgcctcgccggcagaggccagagctgcgcggtgcggagccatgagaggggacgacgggggggaggaggaggaggcggcggcggcggcggcggcgccgctgctggtgccggtgccgcagcaggggaaggggggcgagggcggccgggtggcgcgggagtggtgggaggagtcgaagcggctgtggcggatcgtggggccggccatcttccagcgggtggcgctgtacgggatcaacgtcgtctcgcaggccttcatcggccacatcggcgacctcgagctcgccgccttctccatcgcctccaccgtcatcgccggcttcaacttcggcttcctgctgggcatggcgagcgcgctggagacgctgtgcgggcaggcgttcggggccaagaagcaccacatgctgggcgtctacctgcagcggtcatggatcgtgctcttcctcttcgcgctggcgctgacgccgacatacgtcttcacggaggacctgctgctgctcctcggccaggcgccggagctgtcccgcctcgccggcaagatgagcgtgtggctcatcccgcagcacttcgccatggccatgctgctcccgctcacccgcttcctgcagagccagctcaagaactgggtcaccgccgccaccgcgggggtcacgctcgcgctccacgtcctcgtcacctacctcctcgtcacccgcttccagctcggctacgccggcgtggtcgtcgccgccgacgtcgcgtggtgggtcgtcgtgctggggcagttcttgtacgtcgtctgcggcggctgcccgctctcgtggaggggcttctccgtggaggccttcgccgacttctgggacttcatcaagctctccaccgcatccggcgtcatgctctgcctggagaactggtactacaaagtgcttgtgttgcttacggggtacttgccgaacgctgagatcgccgtggacgccctctccatatgcttgacgatcaacggatgggagatgatgattcccatagggttcctggcggccactggcgtgcgggtggcaaacgagctcggcgcgggcagcggcaagggggcgcgcttctccattgtcgtctccatcaccacctccgtggtgatcgggctcgtcttctggtgcctcatcctcacctacaacgaccagatcgcgctcctcttctcgtcggggaaggccgtgctcgacgccgtgcacaatctctccatgctgctagcattcaccatcctcctcaacagcgtgcagcccgtactctctggggtggctattggttctggatggcaagcattggtcgcctatgtcaacatcggatcctactacctggtcggggtgccgatcggggtcatactgggctggccactcggattcggagttcggggaatttggtctgggttgattggcgggaccgctgttcagacgctcgtgttggtctatctcaccatgagatgtgattgggacgatgaggccaagaccaccagtgcacggatgagaaaatgggccagcacaaaatgagagctactcgacaatattcttgtcaactttcagctccctttgacataggggaaaaggagctcggcagcaggaggttcagaagtaaaaacgttcagaatatggggaggaagtagttgagaagaaaatgcgggcgtgtgtttcgctagggagcaagcatgccggcggcctgtttctcaagatatccgttggtcacgaaaattcagtgtggtatcagagagctcaaaaccatgtatttctacgatatctaaaaccatatgtagtacgaagagaaaaggaggaatgtggtataaattcaaattccaccaagacgaaagcaaaacatcgagacgttgatttg

SEQ ID NO: 4155 - DNA, 2418 bp, Sorghum bicolor; identical to SEQ ID NO: 1576

SEQ ID NO: 4156 - DNA, 2757 bp, Zea mays
ttcgtccggggcgagccgagtccccctccctggctccctcctccttgccgcggcaccctgcatcgcgacgtccgcgaggagacttggcaggcgcggcaatccgcgtgttcttggggagctgctcgtttggtacgcgttgatgctgctaaaaaagtagattcttcactgctcggggatttggaacaaaggccgtggttcgaagctggtgtgttcgttcaattgtgcggaaagaaaggccagtgttatgtgtgaagtagtgaaggctagcaggtaggctggctctcgcctcgccgagcgatggatctcgagttcggtaggggcctgaggtccccaaagagagactcgtggaagaccaccttgctgctggcgtaccagagcctgggggtggtctacggcgacctcagcatctctccgctgtacgtgtacaagagcaccttcgccgaggacatccagcattcggagacgaacgaggagatcttcggcgtgctctccttcgtcttctggacgctcaccctcatccctctcgtcaagtatgtctccgttgtcctgcgagctgacgacaatggcgagggaggaacgtttgccctctactctctgatttgcaggcacgccaatgtgagcctcctcccgaaccggcagatcgccgatgaggagctttccacctacaagctggaatgccctcctgaaatcaccgacaagtcccgcatcaaggtgtggcttgagcggcacaggaagctgcgcgtcgctctgctggtcatggttatgatcgggacatgcatggttatcggggacggtgttctcacgccagctatatccgtgttctcggcagtttcaggcctggagttctcgctgtccaaggatcaccgtgaatatgctgtcattccaataacctgtgtcatattagcattcctatttgccctccagcactatggtacgcaccgggttggatttctgttcgccccgatagttctagcctggctgttctgcatgagtgctcttggcctttataatatcatccactggaatcctcagatctaccaagctctaaatccgtcttacatgttcaagttcttaaaaaagactagaaaatatggatggatgtcacttggtggaatcttgctctgcatgacaggatcagaagcaatgtttgcagatcttggacatttctcatacagtgcaatccagcttgctttcacttgtctagtttaccccgcactgattttggcatacatgggtcaagctgcttacttatcaaaacatcatgacttttactctagctcacaagttggattttacatcgcagttccagataagatcagatggccagtgcttatattggcaattttggcttcggtggtcggaagccaagcaatcatcagcggaacattctcaatcatcaaccagagcctgtccctgagctgcttccctcgagtgaaagttgtacacacatctgagaaaattcatggccaaatatacatccccgagatcaattggttgcttatgatcctctgcattgctgtgaccgttgggtttagagatacaaaacacatgggaaatgcatctggtttggctgtgatcacagtgatgctggtgaccacgttcctgacatccttggtcatcgttctctgctggcacaggccaccgctgctggcgttggctttcctcctgttctttggatccatcgaggcgctttacttctccgcgtccctgatcaagttcctggaaggcgcgtggctccccatcctcctggcgctcatcctgatggccgtcatgctcatctggcactacacgaccatcaagaagtacgagttcgacctgcacaacaaggtgaccctggagtggctcctcgccctcggggacaggctgggcatggtccgcgtccccggcatcggcctcgtgtacacagacctgacgtcgggcgtcccggccaacttctcccggttcgtgaccaacctcccggcgttccaccaggtgctggtgttcgtgtgcgtcaagtcggtgccagtgccgtacgtattcccggcggagcggtacctcatcgggcgtgtcggcccgccgggccaccgctcgtaccggtgcatcgtgcgctacggctaccgcgacgtgcaccaggacgtggactcgttcgagacggagctcgtggagaccctggccacgttcataacgctggacgcctcgtaccgctgcagcgaggccagcgagcgggagctggagctggatcccggggagcaggagcggcggctgaccgtgatcgcgagcaacccgctgcggcgccgcgccagctacgacctccaggacagcgtgcagcattcggcagcgtccaccgtggaggtgcgcgccacggccgccgacagccttagccccagggacgcggagatcagctcggcggcggggccgaagcaggtgcggttcttcatcgacagccacgtggtgagcccggaggccgcggagaacaagcaggttgcggatgagctggaggcgctggcggcggcccgggaggccggcactgcgttcatcctggggcactcgcacgtgcagtgcaagcccgggtcgtcggtgctcaagcggttggcggtggacgtcgggtacaacttcctgcggcgcaactgccgcggcccggacgtcgcgctgcgcgtgccgccggcgtcactgctggaggtcggcatggtgtacgtgctttgattgaggctgagacgatgcgactttttcttatgaacatctgatatagtaatcacgactgttgtcagttttcccagt

SEQ ID NO: 4157 - DNA, 2675 bp, Oryza sativa Japonica Group
attccaattagtgatcttgaggggctccatctgcaacttttcaccttggatatatttgcatccttgcttttcccagctctcctcgccctttccccttcttagagctgattctctcgattgattacctagtactactgcaattcacattgtcagctcttgcttgttcccaggaggatcagtttcttgctgagcaatggatcctgagttcgggagaggcatggcgcctcgaaagagagagccatggcggacgacgctgctgctggcgtaccagagcctcggggtggtgtacggcgacctgagcatctcgcccctgtacgtgtacaagagcaccttcgcggaggacatcacccactcggagtccaacgaggagatcttcggcgtcctctccttcgtcttctggaccctcaccctcatccccctcatcaagtacgtctccatcgtcctccgcgccgacgacaacggcgaaggagggacgtttgcgctctactctctgatctgcaggcacgccaatgtgagcctcctcccaaacaggcaggtcgccgacgaggagctctccacgtacaagctggagtacccgcctgaagtggctaacaggtctcgaatcaaggagtggcttgagaagcacaagactctgcagactgctctgctgatcatggtgatgattggaacctgtatggtcatcggggatggcgtcctcacgcccgcgatatctgtattctcagcggtttcagggcttgaactctccttgtccagggatcagcatgaatatgccgtcattccgataacatgtgtcatattagtgttcctgtttgcactccagcattacggtacccatcgtgtcggatttctctttgcaccaatagtcctagcctggttgatttgcatgagcatgcttggcttgtacaatatcatccactggaaccctcaagtttatcgcgctcttaatccctattacatgctcaaattcttgaggaagactaagaagtctgggtggatgtccctggggggaattttgctctgcatgacaggatctgaagcaatgtttgctgatcttggccatttctcctacagtgcaatccagcttgctttcactacattagtataccctgcactgattttgggatacatgggccaagctgcgtatttatcgaaacatcacactctgaactcaacctaccaaattggttactatatatcggttccagagagtgtaaggtggcctgtgcttgtgctggcaattttggcatcggtcgtcggaagccaagcaatcatcagtggaacattctccatcatcaaccagagccagtcactcagttgcttcccaagagtgaaagtggtgcacacatctgagaatatccatggccagatttacatccctgagatcaactggctgctcatggtcctctgcattgctgtgactgtcggttttcgcgataccaagcatatgggaaatgcatccggattggcagtgatcacggtgatgctggtgacgacatgcctgacatccttggtgatcatgctgtgttggcaccggagtccggcgctggcactcgtcttcttcctcttcttcggctccatcgaggtgctctacttctcggcgtcgctgatcaagttccgggagggggcgtggctgccgatcatgctggcgctcatcctcatggccgtcatgttcatctggcaccacaccaccatcaagaagtacgagttcgacctgcacaacaaggtgaccctggagtggctgctcgccctgggcgacaagctgggcatggtgcgcgtcccgggcatcggcctcgtctacaccgacctcacctccggcgtgccggccaacttctcccgcttcgtcaccaacctcccggcgttccaccgcgtgctggtgttcgtctgcgtcaagtccgtcccggtaccgcacgtgcttcccgccgagcgctacctcgtcggccgcgtcggcccggcggggcaccggtcgtaccggtgcatcgtgcggtacggctaccgcgacgtgcaccaggacgtggactcgttcgaggcggagctcgtcgagagcctcgccaccttcatcaagctggacgcgctgtaccaccgctgcagcgacgccggcagcgggagcgagcagctcgacgacggccgctacgagcgcgagaacgcgctcacggtgatcgggacgaaccctctccggcgatgcctcagctacgaggcctcccacgacggcgtgtcctcggtggacgccgcgcgcagcccgaacgggatagtggaggtcccggcggcggcggcggcggcgccggtgacgaagaaggtgaggttcgtggtggaggcggcgagcccggaggtggagaagggcgtggtggaggagctgcaggagctgtgcgaggcgagggaggccggcacggcgttcatcctggggcactcgcacgtgcagaccaagccgggctcgtcgctgctgaagaagctcgccgtcggcgtcgggtacaacttcctccggcgaaactgccgcggcccggacgtggtgctgcgcgtgccgccggcgtcgctgctcgaggtcggcatggtctacgtcctatgacgtcaccacgagatctcatcgatcaataccctgtaaaaaaaattcaaaatcaaatctctctgcttgtataagaattaagaagcagattggaagaaaattgggcgaattttctccg

SEQ ID NO: 4158 - DNA, 2429 bp, Phragmites australis
ggtacctctaggagacatggatcctgaatttggcgtagggatggcgccccgaaagagggagccatggcggacgacgctgctgctggcgtaccagagcctgggggtggtgtacggcgacctgagcatctccccgctgtacgtgtacaagagcaccttcgccgaggacatcacgcactccgagaccaacgaggagatcttcggcgccctctccttcgtcttctggacgctcaccctcatccccctcctcaagtacgtctccatcgtcctgcgcgccgacgacaacggcgagggaggcacgttcgcactgtactccctgatctgccggcacgccaatgtgagcctcctccccaacaggcaggttgccgacgaggagctctccacctacaagctggagtgcccacctgaagtctccgagaagtcacgaatcaaggtgtggctggagaagcataagaagctgcacaccgcactgctggtcatggtgatgatcggcacctgcatggtgattggggacggcgtcctcacgccggcgctatctgtgttctcagctgtttcagggcttgagctctccttgtccaaagatcagcatgagtacgccgtaatcccgataacctgctccatattagtattcctgtttgctctccagcattatggcacccaccgtgtcggatttctcttcgctccgataattctgtcctggctactctgcatgagcgcaatcggcctgtataacatcatccactggaaccctcaagtttaccaggccctaaatccctattacatgctcaaattcctgaagaagaccaggaagtctggctggatgtccctgggaggaattttgctatgcatgacagggtctgaagcaatgtttgcagatctgggccatttctcctacagttcaatccagcttgctttcacttctctagtgtacccttcactgattctgggatacatgggtcaagctgcttatttgtccaaacaccataaccttgacgcaagctaccaaataggattctacatcgcagttccagagagtgtcaggtggcctgtgcttgtgctggcgattctggcgtcggttgtcggaagccaagcaatcatcagtggaacgttctccattatcaaccagagccagtccctaagttgcttccccagggtgaaagttgtgcacacgtctgacaaaattcatggacagatatacatccctgaggtgaactggatgctcatgatcctctgtattgctgtgactgtcggttttcgcaatacaaagcgcatgggaaatgcatctggcttggcggtaatcacggtgatgctggtgacgacatgcctcatgtccctggtgatcatgctgtgctggcaccggtcgccggcgtgggccctggtgttcctcctcctcttcggctcgatcgaggcactctacttctcggcgtcgctgatcaagttcctggagggtgcgtggctgccgatcctgctggcgctcatcctgctggccgtcatgttcgtgtggcatcacacgacgatcaagaagtacgagttcgacctgcacaacaaggtgaccctggagtggctgctcgcccttggcgacaagctcggcatggtgcgcgtcccgggcattggcctcgtctacacggacctgacctctggcgtcccggccaacttctgccgcttcgtgaccaacctcccggcgttccaccgggtgctcgtcttcgtctgcgtcaagtccgtgccggtgccgcacgttctccccgccgagcgctacctcgttggtcgcgtcggcccgccgggccatcggtcctaccggtgcatcgtgcggtacggctaccgcgacgtgcaccaggacgtggactcctttgagacggagctcgtcgagagcctcgttaccttcatcaagctcgacgcgctgttccggtgcagcgacgccgagcgccgggacagcagctacgagcgagagaacgcgctcacggtcatcgggagcaacccgctgcgacgccacctcgactacgacgactcccacgaaggcgcgtcgtccgtcgagatgagcgcgggcatatacagcccgaacggcatagagctcgccgcgtcggcgcaggggccggcgatcaagaagcaggtgagattcgcggcagcgagcccccgcgtggacgagcgcgtgctggaggagctgcacgagctgtgcgaggcgcgggaggccggcacggcgttcatactgggtcactcgcacgtacagacgaagcccgagtcgtcgctgctgaagaagctcgccgtcggcgtcgggtacaacttcctgcggcggaactgccgcggccctgacgtggcgctgcgcgtgccgccggcttccctgctcgaggtcggcatggtctacgtgctatgaggacgcggtggcgcgcggtttttacggcttaaaactatggatctctctgcctgtgtgcagtaca

SEQ ID NO: 4159 - DNA, 2430 bp, Phragmites australis
ggtacctctaggagacatggatcctgaatttggcgtagggatggcgccccgaaagagggagccatggcggacgacgctgctgctggcgtaccagagcctgggggtggtgtacggcgacctgagcatctccccgctgtacgtgtacaagagcaccttcgccgaggacatcaagcactccgagaccaacgaggagatcttcggcgccctctccttcgtcttctggacgctcaccctcatccccctcctcaagtacgtctccatcgtcctgcgcgccgacgacaacggcgagggaggcaccttcgcactgtactccctgatctgccggcacgccaatgtgagcctcctccccaacaggcaggttgccgacgaggagctctccacctacaagctggagtgcccgcctgaagtctccgagaagtcacgaatcaaggtgtggctggagaagcataagaagctgcacaccgcactgctggtcatggtgatgatcggcacctgcatggtgattggggacggcgtcctcacgccggcgctatctgtgttctcagctgtttcagggcttgagctctccttgtccagagatcagcatgagtacgccgtaatcccgataacctgctccatattagtattcctgtttgctctccagcattatggcacccaccgtgtcggatttctcttcgctccgataattctgtcctggctactctgcatgagcgcaatcggcctgtataacatcatccactggaaccctcaagtttaccaggccctaaatccctattacatgctcaaattcctgaagaagaccaggaagtctggctggatgtccctgggaggaattttgctatgcatgacagggtctgaagcaatgtttgcagatctgggccatttctcctacagttcaatccagcttgctttcacttctctagtgtacccttcactgattctgggatacatgggtcaagctgcttatttgtccaaacaccataaccttgacgcaagctaccaaataggattctacatcgcagttccagagagtgtcaggtggcctgtgcttgtgctggcgattctggcgtcggttgtcggaagccaagcaatcatcagtggaacgttctccattatcaaccagagccagtccctaagttgcttccccagggtgaaagttgtgcacacgtctgacaaaattcatggacagatatacatccctgaggtgaactggatgctcatgatcctctgtattgctgtgactgtcggttttcgcaatacaaagcgcatgggaaatgcatctggcttggcggtaatcacggtgatgctggtgacgacatgcctcatgtccctggtgatcatgctgtgctggcaccggtcgccggcgtgggccctggtgttcctcctcctcttcggctcgatcgaggcactctacttctcggcgtcgctgatcaagttcctggagggtgcgtggctgccgatcctgctggcgctcatcctgctggccgtcatgttcgtgtggcatcacacgacgatcaagaagtacgagttcgacctgcacaacaaggtgaccctggagtggctgctcgcccttggcgacaagctcggcatggtgcgcgtcccgggcattggcctcgtctacacggacctgacctctggcgtcccggccaacttctgccgcttcgtgaccaacctcccggcgttccaccgggtgctcgtcttcgtctgcgtcaagtccgtgccggtgccgcacgttctccccgccgagcgctacctcgttggtcgcgtcggcccgccgggccatcggtcctaccggtgcatcgtgcggtacggctaccgcgacgtgcaccaggacgtggactcctttgagacggagctcgtcgagagcctcgttaccttcatcaagctcgacgcgctgttccggtgcagcgacgccgagcgccgggacagcagctacgagcgagagaacgcgctcacggtcatcgggagcaacccgctgcgacgccacctcgactacgacgactcccacgaaggcgcgtcgtccgtcgagatgagcgcgggcatatacagcccgaacggcatagagctcgccgcgtcggcgcaggggccggcgatcaagaagcaggtgagattcgcggcagcgagcccccgcgtggacgagcgcgtgctggaggagctgcacgagctgtgcgaggcgcgggaggccggcacggcgttcatactgggtcactcgcacgtacagacgaagcccgagtcgtcgctgctgaagaagctcgccgtcggcgtcgggtacaacttcctgcggcggaactgccgcggccctgacgtggcgctgcgcgtgccgccggcttccctgctcgaggtcggcatggtctacgtgctatgaggacgcggtggcgcgcggtttttacggcttaaaactatggatctctctgcctgtgtgcagtacgc

SEQ ID NO: 4160 - DNA, 2493 bp, Phragmites australis
ggtacctctaggagacatggatcctgaatttggcgtagggatggcgccccgaaagagggagccatggcggacgacgctgctgctggcgtaccagagcctgggggtggtgtacggcgatctgagcatctccccgctgtacgtgtacaagagcaccttcgccgaggacatcacgcactccgagaccaacgaggagatcttcggcgccctctccttcgtcttctggacgctcaccctcatccccctcctcaagtacgtctccatcgtcctgcgcgccgacgacaacggcgagggaggcaccttcgcactgtactccctgatctgccggcacgccaatgtgagcctcctccccaacaggcaggttgccgacgaggagctctccacctacaagctggagtgcccgcctgaagtctccgagaagtcacggatcaaggtgtggctggagaagcataagaagctgcacaccgcactgctggtcatggtgatgatcggcacctgcatggtgattggggacggcgtcctcacgccggcgatatctgtgttctcagctgtttcagggcttgagctctccttgtccagggatcagcatgagtacgctgtaatcccgataacctgctccatattagtattcctgtttgctctccagcattatggcacccaccgtgtcggatttctcttcgctccgataattctgtcctggctactctgcatgagcgcaatcggcctgtataacatcatccactggaaccctcaagtttaccaggccctaaatccctattacatgctcaaattcctgaagaagaccaggaagtctggctggatgtccctgggaggaattttactttgcatgacagggtctgaagctatgtttgcggatcttggtcacttctcttacagtgcaatccagcttgctttcacttctttagtgtacccttcattgattttgggatacatgggtcaagctgcttatttgtccaaacaccataaccttgacgcaagctaccaaattggattctacatcgcagttccagagagtgtcaggtggcctgtgcttgtgctggcaatattggcgtcagtggtcggaagccaagcaatcatcagtggaacattctccattatcaaccagagccagtccctgagctgcttccccagggtgaaagttgtgcacacatctgacaagattcatggacagatatacatccctgagatcaactggttgctcatgatcctctgtatcgctgtaactgtcggttttcgcaatacaaagcgcatgggaaatgcatctggcttggcggtaatcacggtgatgctggtgacgacatgcctcatgtccctggtgatcatgctgtgctggcaccggtcgccggcgtgggccctggtgttcctcctcttctttggctcgatcgaggcactctacttctcggcgtcgctgatcaagttcctggagggtgcgtggctgccgatcctgctggcgctcatcctgctggccgtcatgttcgtgtggcaccacacgacgatcaagaagtacgagttcgacctgcacaacaaggtgaccctggagtggctgctcgcccttggcgacaagctcggcatggtgcgcgtcccgggcattggcctcgtctacacggacctgacctctggcgtcccggccaacttctgccgcttcgtgaccaacctcccggcgttccaccgggtgctcgtcttcgtctgcgtcaagtccgtgccggtgccgcacgttctccccgccgagcgctacctcgttggtcgcgtcggcccgccgggccatcggtcctaccggtgcatcgtgcggtacggctaccgcgacgtgcaccaggacgtggactcctttgaggcggagctcgtcgagagcctcgttaccttcatcaagctcgacacgctgttccggtgcagcgacgccgagcgccgggacagcagctacgagcgagagaacgcgctcacggtcatcgggagcaacccgctgcgacgccacctcgactacgacgactcccacgaaggcgcgtcgtccgtcgagatgagcgcgggcatatacagcccgaacggcatagagctcgccgcgtcggcgcaggagccggcgatcaagaagcaggtgagattcgcggcagcgagcccccgcgtggacgagcgcgtgctggaggagctgcacgagctgtgcgaggcgcgggaggccggcacggcgttcatactgggtcactcgcacgtacagacgaagcccgaatcgtcgctgctgaagaagctcgccgtcggcgtcgggtacaacttcctgcggcggaactgccgcggcccggacgtggcgctgcgcgtgccgccggcttccctgctcgaggtcggcatggtctacgtgctatgaggacgcggtggcgcgcggtttttacggcttaaaactatggatctctctgcctgtgtgcagtacgcagatgttaatatgctgatgtaaattgtaatgtgatgcaatgcaacgatgccctgacatttctc

SEQ ID NO: 4161 - DNA, 2695 bp, Hordeum vulgare subsp. vulgare
tgagtatagtatagtgccgtatcccgtcattgccagcccccgcttctttcgaggtgtctttcgtctgcgtgcgtgccaatcttgctctcggcgggtggctcaatccgttcgacaaataacagtgctgcttttaccttgatgtgctctgttctcgaagctggcagaaggaattcataggagcgtagctgttacctcgccgacggccaacggatcctgcccgagctcgggagcgcagcagccatggagccaggaaagcgggagacatggcggacgacgatgttgctggcgtaccagagcctgggggtggtgtacggggacctgagcatctctccgctctacgtctacaagagcaccttcgccgacgacatcacgcacaccgactccaacgacgagatcctcggcgtcctctccttcgtcttctggacgctcaccctcgtcccgctcatcaagtacgtctccatcgtgctccgcgcccacgacaacggcgagggcggcaccttcgcgctctactccctcatctgcaggcacgccaacgtcagcctgctccccaaccgccagctcgccgacgaggagctctccacctacagcctcgagcgcccgccggaggaggtcgcccacggctcccgcgtcaggcgatggctcgagggccacaggagcctcaaaaccgccctgctcgtcatggtcatgattggcacctgcatggtcatcggcgacggcgtcctcacccccgtcatctccgtgttctcggctgtttctgggcttgagctctccttgtccaagcatcagcatgaatatgccgtcactccgataacctgtgccataatagtgttcctgtttgctctccagcattacggcacacaccgtgtcgggtttctcttcgctccgataattctagcctggctgatctgcatgagtgcgctcggcgtgtacaatatcatctactggaaccctcaggtttacatggcactcaatcccatgtacatgctcaaattcttgaggaagaccaagaagtctggttggatgtccctgggagggattgtgctctgcatgacaggatctgaagcaatgtttgcagaccttggccacttctcctacagtgcaatccagcttgctttcacttctttggtatatcctgcactgatcttaggatacatgggtcaagctgcctatttaaccagacaccataacttcgactcgagctaccaaattggatactacatctcagttccagaggctgtgagatggccagtgctggtgctggcgatcatggcgtcggtggtgggaagccaagcgatcatcagcggaacattctccatcatcaaccagagccaggccctcagctgcttcccgcgggtgaaggtcgtgcacacgtcggccaaggtccatggccagatctacatcccggagatcaactggatgctcatggtgctctgcattgccgtcaccgtgggcttccgcgacaccaagcacatggggaacgcgtccgggctggcagtgatcaccgtgatgctggtgaccacgtgcctgacctcgcttgtgatgatgctctgctggcagcggccgccggcgctggcgcttgccttcttcgtcttcttcggctccatcgaggcgctctacttctcggcgtcgctcacgaagttcctcgacggcgcgtgggtgccgctcctcctcgcgctcatcctcgtcgccgtcatgttcgtgtggcaccacaccaccgtcaagaagtacgagttcgacctccacaacaaggtcaccatggagtggctcctcgcgctctgcgacaggctgggcatggtccgcgtccccggcatcggcctggtctacaccgacctcacctccggcgtgcccgccaacttctcgcgcttcgtcaccaacctccccgcgttccaccgcgtgctcgtcttcgtctgcgtcaagtccgtgcccgtgccccgggtgctccccgccgagcgctacctcgtcggccgcgtcggcccggcgggccaccgctcgtaccgctgcatcgtgcgctacgggtaccgggacgtgcaccaggacgtggactcgtttgagacggagctcgtcgagagcctcgcgtccttcatccggctcgacgcgctgttccggtgcagcgacgcccgcagcgacgccgactacgagcgggagaacgcattcaccgtcatcggcagcaacccgctccggcgccgcatcagctacgacgacacccacgacagcgcctcgtccgtggagatacgcgtggacagcatgacaggcagcgggacgaataccgtagagctcgcggccgtgccgacggcggcgcgggttgtgaagagggtgaggttcctcgtggaccccgggagccccgaggtggaggacaagcagatgctggaggagctccacgagctgtgcgaggcgagggaggccggcacggccttcatcatgggccactcccacgtgaaggccaagcccgggtcgtcgctgctcaggaggttggccatcgggtacgggtataacttcctgcgccggaactgccgcggcccggacgtcgtgctccgcgtgccgccggcgtcgctgctcgaggtcggcatggtctacgtgctgtgattcacagacacggggcttctgttctgtctctagcttccggacatgctgctgtaaattgtaacgtgacggccggcatgacgcgtgatggaaatcttttatgttttgattgatg

SEQ ID NO: 4162 - DNA, 2934 bp, Sorghum bicolor
gcttccttccctccgtccccctgcggctcctggttgcccctctcacgccaatgcagcttccccctgtttcgttgctttgaccaccttaaaaacctcagggcctccaaattgtcccaccgaatcacatccccttcacgcctcctcctgctcctgctccaattcctaacgcccgagaaaccaagaacccggctgggcgacgccgtcaccttcacctaatcccaactcccccccactagtactcacaagtgtctctcttcttccctctcttcggttacgagagcagacctgagttaccgagcagcgacgatgaagagcccccctgtcatggatcccgaggcgccgccgccgccgggcactcctccctacgacgacgaggaggaggaggaggaggaggaggaggagaaggcgcggggagcacggaagcgggtgccgtggcggatgacgctgagcctggcgtaccagagcctcggcgtggtgtacggcgacctcagcacgtcgccgctgtacgtgtacaaggcggcgttcgcggaggacatccagcactcggagagcaacgacgagatcctcggcgtgctctccttcgtcttctggacgctcacgctcgtcccgctcctcaagtacgtctgcgtcgtcctccgcgccgacgaccacggcgagggtggcaccttcgcgctctactccctcctctgccgccacgcgcgcgccgcgctgctcccgccgggacggaccgccgccggcgaggaggacaagttcttggacggagccaccaagaaggctacggcgcagaacggcaatgctgcgacgctgggcgggggcgccgccgccagcgtcaggaggctgctgcagcggcacaaggtcctccagcgtgtgctgctcgtgctggcgctggtgggcacctgcatggtgatcggcgacggcgtgctcacgccggccatctccgtcttctctgcggtctccgggctggagctgtccatggagaaggaacatcataaatatgtggaacttcctattgcctgtatcatactggtttgcctgtttgcactgcaacactatggtacacaccgggttggcttcatttttgctccagttgtgataacatggctcctatgtataagcgtgatcggtgtttacaatattattcactgggaacccactgtatatcgagcattatctccgtattacatgtacaagttcttgaggaagacacagagaggaggttggatgtccctgggaggaatactgttatgcgtaactggttctgaagcaatgtttgctgatctggggcatttcaaccagttgtcaatacagattgcttttacatgcatggtgtatccagcattgatccttgcatacatgggacaagctgcttatctgtgtaagcatcataacatggaaactgactacaggattggattctatgtgtctgtgccagagaaaattaggtggcccgttatggcaattgctattcttgcagcagttgtgggaagccaagctgtcatcactggtacattctcaatgatcaagcagtgcacttctctgggctgctttcctcgggtgaagataattcatacatctgccaaagtacacgggcaaatatacatccctgagatcaattggattctgatgatactgtgcttagctgtaaccattggattcaggaacacaaaacacttggggaatgcatcaggattggctgttataactgtcatgctggtcacaacgtgtctgatgtccctggtgatagtcttgtgctggcataagagcatatttcttgcaattgccttcattgtgttctttggaaccattgaggcactgtacttctcagctgcactcatcaagttcaaggagggagcctgggtcccaatagtccttgctctgatcttcattttgataatgtgcatctggcactatggcaccattaagaagtatgagtttgacgttcagagcaaggtctccatcaactggctccttggtctcagcccaaacctcggtattgttcgtgtccgtggcattggcctcatccacactgagctcgaaaccggcatcccagctatcttctcgcattttgtcaccaacttaccggcctttcaccaggtactcatatttatgtgcatcaagaacgtgccaataccacatgtacggcctgaagagcggttcctcgttggaaggatcggtccgaagcagtacagaatctaccggtgcattgtcaggtacggttaccacgacttccacaaagacgacattgagttcgagaaggagctagtgtgcagcgtcgcggagttcatccggtcagggtcatccaagttgaacggcatgcccgtggagttcgacgaggagcagcacatggcggtcgtgcgctccaacagcatccgcatgcttgaggaagaggccaccacagtggagaagaccgttggcccgtcgcatgccagcagggagatacagtcaccatcaccgtcaccgtcgccgtcaccagcgaccccagtggttgtccccaagaagcgggtgcggttcgtgctgccggcagcgagcccgaagccaaacgccggcgtgcaggaggagctgcaggagctgtccgacgcgcgggaggctggcatggcgttcatcctgggccactcgcacgtgaaggccaagagcgggtccagcttcctccgccggttcgtgatcaacttctgctacgacttcctgcggaggaacagccggggacccaactacgccgtctccatcccgcacgcctccacgctggaggtgggcatgatgtactatatctgatctgactgaacccctgaaactctgatcagagggagaaatataggaacaggaaaagatgagaggaaatgaaaccaaaaaaaaaaagttttcagctgtatatgctagattttgtaagtatatactgctggtgagttccgttgtaaatgcagcttgattttggccttc

SEQ ID NO: 4163 - DNA, 2739 bp, Zea mays
aaccgaatcacatcctgtcacgcctcctgctcaaattcctaacgcccgagaaaccaagaaccggggtgaggccgctgtgcgacgccgtcaccttcacctaatcccaacttccccactagtcctcaagtgtctctcttcttctcttcggttacaagagcagaccggagttaccgggcggtggaggccgcgatgaagagccctcctgtcatggatcccgaggcgccgccatcgccgccgctgccgggcactcctcccgatgacgaggaggagaagcggggaggacggaacggggtgccatggcggatgacgctgagcctggcgtaccagagccttggcgtggtttacggcgacctcagcacgtcgccgctgtacgtgtacaaggcggcgttcgcggaggacatccagcacacggagagcaacgaggagatcctcggcgtgctctccttcgtcttctggacgctcacgctcgtcccgctcctcaagtacgtctgcgtcgtcctccgcgccgacgaccacggcgaaggcggcaccttcgcgctctactccctcctctgccgccacgcgcgcgccgcgctcctcccgccaggacgaaccgccgccggggacgaggaccagttcttggacggagccgacggtggcaccaagaaggctacggcgcagaacggcaatgcagtgacgctgggcgggggcgctgctgccagcgtcaggaggctgctggagcggcacaaggtgctgcagcgtgtgctgctcgtgctggcgctggtgggcacctgcatggtgatcggcgacggtgtgctcacgccggccatctccgtgttctctgcggtttccgggctggagctgtccatggagaaggaacatcataagtatgtggaacttcctattgcctgtatcatactggtttgcctgtttgcactgcaacactatggtacacaccgggttggcttcatttttgctccagtagtggtcacatggctcctatgtataagcgtgattggtgtttacaatattattcactgggaacccactgtatatcgagcattatctccgtattacatgtacaagttcttgaggaagacgcagagaggaggttggatgtccttgggaggaatactgttatgcgtaactggttctgaagcaatgtttgccgatctagggcattttaaccagttgtcaatacagattgcttttacatgcatggtgtatccagcattgatccttgcatacatgggacaagctgcttatctgtgtaagcatcataccatggaaagtgactataggattggattctatgtgtctgtgccagagaaaattaggtggcccgttatggcaattgctattcttgcagcagttgtgggaagccaagcagtcatcactggtacattctcaatgatcaagcagtgcacttctctgggctgctttcctcgggtgaagataattcatacatctgccaaagtacacgggcaaatatacatccctgagatcaattggattctgatgatactgtgcttagctgtaaccattggtttcaggaacacaaaacacttgggaaatgcatcaggattggctgttataaccgtcatgctggtcacaacgtgtctgatgtccctggtgatagtcttgtgctggcataagagcatatttctggcaattggcttcattgtgttctttggaaccattgaggcactgtacttctcagcggcactcatcaagttcagggagggggcctgggtcccaatcgtccttgcttttatcttcattttgataatgtgcatctggcactatggcaccatcaagaggtatgagtttgacgtccagagcaaggtttccatcaactggctccttggtctcagcccgaacctcggcatagttcgtgtccgcggcattggcctcatccacaccgagctcgaaactggcgtcccggcaatcttctcgcattttgtcaccaacttaccagccttccaccaggtactcatattcatgtgcatcaagaacgtaccaataccacatgtccgtcctgaagagaggttcctcgttgggaggatcggcccgaagcagtacagaatgtaccggtgcatcgtcaggtacggctaccacgacttccacaaggacgacattgagttcgagaaggagctggtgtgcagcgtcgcggagttcatccggtcagggtcgtccaagttgaacggcatgcccgaggagttcgacgaggaggagcagcgcatggcggtagtccgctccaacagcatccgcatgctcgaggaagaggctacagtggagaagaccgtcggcccgtcccaggccagcagggagatacggtcgccgtcgcccactcctcccccggtggttggccccaagaagcgggtgcggttcgtgctgccggcagcgagcccgaagccgaatgccggcgtgcaggaggagctgcaggagctgtccgacgcgcgggaggccggcatggcgttcatcctgggccactcgcacgtgaaggcgaagagcgggtccagcttcctccgccggttcgtgatcaacttctgctacgacttcctgcggaggaacagccggggtcccaactacgccgtctccatcccgcacgcctccacgctggaggtgggtatgatgtactatatctgatctgatgactgaacccctgaaactgagggggagaaatataggagcaggaaaagatgaagaggaaatggaacaaaaagttttcagctgtatatgcaaaaaaaaaaaaaaaaa

SEQ ID NO: 4164 - DNA, 3079 bp, Hordeum vulgare subsp. vulgare
gatgctccgcctcctctgctccgcgcgcggctcacgccaatgctgtgccgcctccggtcgaacctgccccccgcgctgctcctttgacctcccgtaaaaaaagcctccagggctccagatatatcccacctaatcccccccgtcccaccccgtccccgtcccctgccggtttctgcacagtccgagaattcaagaacgtcccggcagcgccaactcccaactccccgcaaggcacagggcagtgcactccggagcgcggacaaacagggccgatcgagcggtggaggacgagaggagaggagaggggcccggatgaagagctccccttccatggaccctgaggccgcggccgcccggggcaccccgccggagaacacggaggggaggcggggagaggggaagaagaggctgccgtggcggatgaccctgagcctggcgtaccagagcctcggggtggtgtacggcgacctgagcacgtcgccgctctacgtctacaaggcggcgttcgcggacgacatccagcactcggagaccaacgaggagatcctcggcgtgctctccttcgtcttctggacgctcaccctcgtgccgctcctcaagtacgtctgcgtcgtgctccgcgccgacgacaacggcgagggcggcaccttcgcgctctactccctcctctgccgccacgcccgcgccgcgctcctcccgccgggccgcggcgccgagcccggggacgaggaccagttctccgacgccgccggcgccaccgccaagaagtacctcgagtacgacaatgccgacgcgctgggcgggcgtggcgggggcgccgccgccagcgtcaggcgggtgctggagcgccacaaggtgctgcagcgggtcctgctcgtgctggcgctcgtcggcacctgcatggtcatcggcgacggcgtcctcacgccggccatctccgttttctccgcggtgtccgggctggagctgtccatggagaaggggcatcacaaatatgtggagttgcctcttgcttgcttcatactggtgtgcctgtttgcgctgcaacactatggcacccaccgggtgggattcattttcgccccgatcgtgatcgcatggcttctatgcataagcatgattggtgtttacaatattgtgaaatgggagcctcacgtgtatcaagcgttatccccgtattacatgtacaagttcttgaagaaaacacagaggggaggctggatgtccctgggtggaatactgctctgtgttacaggatctgaagcgatgttcgcagatctggggcatttcaaccagttgtctatacagattgcttttacttgcatggtttacccatcattgatccttgcatacatgggccaagctgcttatctgtctaagcatcatatcctggaaggtgactacagggtcggattctacgtgtctgtgccagagataattagatggccagttctggcaatcgccattctcgcggcagttgtgggcagccaagctgttatcaccggcacattttcgatgatcaagcagtgcacatccctgggctgcttcccacgggtgaagatcgtgcacacctctgcccaagtacatgggcagatatacattccagagatcaactggatcctgatgatactgtgcttagcagtaaccattggtttcagagacacgaaacacttgggcaatgcatcagggttggctgtaataaccgtcatgctggtcaccacatgtctgatgtccctggtgatagtcctgtgctggcacaagagcatattcctggcaatcgggttcatcgtgttcttcggcaccattgaggcgctgtacttctcggctgcgctcatcaagttcaaggaaggagcctgggtccccatcgtcctcgccttcgtcttcatgatggtaatgtgcatttggcactacggcaccatcaagaagtacgagtttgatgttcagaacaaggtctccatcaactggctccttggcctcagcccgaacctcggcatcatccgtgtccgtggcatcggcctcatacacactgagctcgacagcggcatccctgcgatcttttcccattttgtcaccaatctgcctgcattccatcaggtgctcatcttcatgtgcatcaagaacgtcccgatcccgcacgtctcgccgaacgagcggttcctggtgggaaggatcgggccgaaggagtacagaatctaccggtgcatcgtccggtacgggtaccacgacgtgcagatggacgaccaggagttcgagaaggacctcgtgtgcagcgtcgccgagttcatccggtcagggggcggcgcctccaaggcgaacggcctgacgccggacgtcgccgacagggacgaggagcggatgacagtcgtggcctctggcaggatgcgcatgctggaggaggagggcctcggcggcgcgtcggcatcggggagcaccgtcgggccctcgcgcgcccccaggggggagagggagatacggtcgccgtcgccaacgccaacgccaacgccaacgcctacgccggcgatgggcgtccggaagagggtgaggttcgtgctgccggcgtcgaccccgcggccgaacgccggtgtggaggaggagctgcgggagctgacggatgcgcgggaggccggcatggccttcatcctgggtcactgctacgtcaaggccaagaccgggtccagcttcctccggcggctggtgatcaacttcggctacgacttcctgcggaggaatagccggggccccagctacgccgtcaccgtcccgcacgcctccaccctcgaggtcggcatgatatactatgtctgagctgatggagctccggaggctataggatgaagataaagctagaaggaaatgggaaatgagacgaattttcagctgtatatgctagtagatctggacatgtatgagtttttggtacatgtatgtagccttgttttttcttgggcctcttccttcttcaacctgtaagtagtagcacaaagacgggcgccattagagaggatgagagggtcagggaagttgtactgcggattgaaaagaccgagcagaaatccagaagctgtgatttccgtaggcc

SEQ ID NO: 4165 - DNA, 4090 bp, Oryza sativa Japonica Group
gagggagcagcagcaagaggaggcggctgccatggcggatgacgatgagcctggcgtaccagagcctcggggtggtgtacggcgacctgagcacgtcgccgctgtacgtgtacaagccggcgttcgcggaggacatccagcactcggagaccaacgaggagatcctcggcgtgctctccttcgtcttctggacgctcaccctcgtgccgctcctcaagtacgtctgcgtcgtcctccgcgccgacgacaacggcgagggcggcaccttcgccctctactccctcctctgccgccacgcccgcgccgcgctcctcccgcctggcggcggcggcggcggcggcgagccgggcgacaaggaccagttcttggacgcgggcgccgacaagaaagccgcggcgaacggcaatgcgctggcgctgagcgggcgcgccggcggaggcggcgccgccgccggcgtgaggaggctgctggagcggcacaaggtgctgcagcgcgtgctcctcgtgctggcgctggtgggcacgtgcatggtcatcggcgacggcgtgctcacgccggccatctccggtgcgtgcgcgcccccgcttgatttgctggcttgtttgtgttcttgggttgtcgtgtgctgattttcagatggcgtgttctgtttttgcagtgttctcggcggtatccgggctggaattgtccatggaaaagcatcagcacaaatgtaaggatctgaacacccaaccatgcctttgtcccttccattgtttctgtcttttgatatgattgtagatttgtcttcctcatcttgttaactactgtttcctggatcatcatgttctgagtttttttagataattcagggtccacctcaaactcaaaagggtgcagtttcttgtttttttagttgaaaaaagtgtgcagtttcagtcatactagtgcaccacaattcgagtaaattttacctgtaagatgcacgcaagagatggattctgtgcaatttggtgttcgtaaaaccaggaattatgttaactgatgaagtctgaacagtttgcttcaatgggattgatacttttggaagtttccgtgcgagcttatcggctcagatatcagatgatcaattgcgtgccaaattcatttaggaaggtctttgacagggaatgaccatgagcaacgcagcgttgtcgcatggacaccaacaatcaactccgtactgttgttagtcaatgtatgcctaacagttgttgctataatgctattagcctacgaactggagaagattaatactcttatctagtagcattgatgactacaataaatggaactaccctactcaagcagttgtgattcttgtgaagaactgtagtgggaaacagaaagaaaagatttgagcgattcctaaataagccggtcatcatctaaattactgtatctgttcagttcatattctcttgggctttggcagaggatagagttcactctgggcagaaatatggtcagctagtggtaataaggttcggaaattctggaaaatggaagctacacatgctgaaagtaataaaataagtgctgaattctgaagtgcggagtaaagaaactctattttgacttttaatcatttaagcatgtgcttttattctgattcttgttttgctaatatgttttgtttcttttttaacccattactaactgtgcaaagttttttttactgatttgaatctgcagatgtggaggttcctattgcttgttttgtactggtttgcctgttttgtctgcaacactatggtacacaccgggtggggttcctttttgcaccaattgtgattacatggcttctatgtataagcatgattggtgtttacaatatcgtgcattgggagcccaatgtctatcgagcgttatctccatattatatgtacaagtttttgaagaagacgcagagaggaggttggatgtcactgggaggaatattgttatgtatcactggtactatgatcaacaaccattttctaccatatgccaatgatctctgaagtgtacaactttactaacttgagtgttgtttttcaggttctgaagcaatgtttgcagatctggggcattttaatcagctgtcgatacaggtgatgaaatagagtgcaatctcaatgttttgttttacttggtttcatcatagtagcaatatgcggacatgcggtcaatagttttgtctctgataagcatttcctgattgcagattgcttttacttgcatggtttacccatccttgatccttgcatacatggggcaagctgcttatctgtgtaagcatcacatcattgaaagtgactacaggatcgggttctatgtgtctgtgcctggcaagtcatgttctccagatctttcatcaacagcgaaatcgatattatatcattctcctagtactgtttattaatatttaaaagttttccatcctcagagaaaattaggtggccagttctggcaattgccattcttgcagcagttgtcgggagccaagctgttatcactggcacattctcaatgatcaagcagtgcaccgctctcggctgctttcctcgggtgaagatagttcacacatctgacaaagtacacgggcaaatttacatccctgagatcaattggatcctgatgatactgtgcttagctattaccattggtttcagagacacaaaacacctgggcaatgcgtcaggtatgtaccacttgttttagtttttgacatatcaaaccacctgattattccatgttcgaattacctatgcatactgaagctaatgagtaaggaatttgtctgatatgcaatagttgtcctttgaacaggattggcggttataaccgttatgctggtcacgacatgtctgatgtccctggtgatagttctgtgttggcacaagagcatcttcctcgcattcggcttcatcatcttcttcggcaccattgaggcactctacttctcagcatcactcatcaagttcagagaaggagcctgggtcccaattgtgctggccttcatcttcatggcgataatgtgcatctggcactatggcaccatcaagaagtatgagttcgatctccagaacaaggtctccatcaactggctccttggcctcagccccaacctcggcattgtccgagtccgcggcatcggcctcatccacaccgagctcgactctgggatcccggcaatcttctcgcatttcgtcaccaacctacctgcatttcatcaagtaatcttgctcatcagccatcattcctcgccttctgaagttgttgtcattgttcagaaattcagaattttggttacagtgctcatcatcttcttcttcttgatgatgatcaggtgctcatcttcctctgcatcaagaacgtcccgataccgcatgtctcgccggaggagaggttcctcgtcggaagaattggccccaaggagtacagaatctaccggtgcattgtcaggtacggctaccacgacgtgcacaaggacgatcaggagttcgagaaggagctcgtctgcagcgtcgcggagttcatccgctccggcgccgccgccgcggccgacgccgcggcctctttcaagcccaagaacgtctgcggcggcggcgcggaggagtcggagaaagaggaggaggagcggatgtccgtcatcccctccggcagcattcggatgatggaggaggacggcggcgcgggggcgccgtcgtcggaggacaccgtcggcggcagcggcagcggcagcggcagaggcagctcgcgcggcggcggcggcgcaagggagatcatgtcgccgtcgccgtcgccgccgccggtggtggtggcgccgaggaagagggtgcggttcgtgctgccggcggcgagcccgcggccggacgccggcgtgcgggaggagctgcaggagctgatggacgcgcgcgaggccggcatggcgttcatcctcggccactcctacgtcaaggccaagagcggctccagcttcttccggcggctggtcatcaacttctgctacgacttcctccgccgcaacagccgcggccccaactacgccgtcaccatccctcacgcctccaccctcgaggtcggcatg

SEQ ID NO: 4166 - DNA, 2532 bp, Oryza sativa Japonica Group
atgaagagcccgtctcccgtggatcctgagtcgccgagttctcccgattgcaagggagggagcagcagcaagaggaggcggctgccatggcggatgacgatgagcctggcgtaccagagcctcggggtggtgtacggcgacctgagcacgtcgccgctgtacgtgtacaaggcggcgttcgcggaggacatccagcactcggagaccaacgaggagatcctcggcgtgctctccttcgtcttctggacgctcaccctcgtcccgctcctcaagtacgtctgcgtcgtcctccgcgccgacgacaacggcgagggcggcaccttcgccctctactccctcctctgccgccacgcccgcgccgcgctcctcccgcctggcggcggcggcggcggcggcgagccgggcgacgaggaccagttcttggacgcgggcgccgacaagaaagccgcggcgaacggcaatgcgctggcgctgagcgggcgcggcggcggaggcggcgccgccgccggcgtgaggaggctgctggagcggcacaaggtgctgcagcgcgtgctcctcgtgctggcgctggtgggcacgtgcatggtcatcggcgacggcgtgctcacgccggccatctccgtgttctcggcggtatccgggctggaattgtccatggaaaagcatcagcacaaatatgtggaggttcctattgcttgttttgtactggtttgcctgttttgtctgcaacactatggtacacaccgggtggggttcctttttgcaccaattgtgattacatggcttctatgtataagcatgattggtgtttacaatatcgtgcattgggagcccaatgtctatcgagcgttatctccatattatatgtacaagtttttgaagaagacgcagagaggaggttggatgtcactgggaggaatattgttatgtatcactggttctgaagcaatgtttgcagatctggggcattttaatcagctgtcgatacagattgcttttacttgcatggtttacccatccttgatccttgcatacatggggcaagctgcttatctgtgtaagcatcacatcattgaaagtgactacaggatcgggttctatgtgtctgtgcctgagaaaattaggtggccagttctggcaattgccattcttgcagcagttgtcgggagccaagctgttatcactggcacattctcaatgatcaagcagtgcaccgctctcggctgctttcctcgggtgaagatagttcacacatctgacaaagtacacgggcaaatttacatccctgagatcaattggatcctgatgatactgtgcttagctattaccattggtttcagagacacaaaacacctgggcaatgcgtcaggattggcggttataaccgttatgctggtcacgacatgtctgatgtccctggtgatagttctgtgttggcacaagagcatcttcctcgcattcggcttcatcatcttcttcggcaccattgaggcactctacttctcagcatcactcatcaagttcagagaaggagcctgggtcccaattgtgctggccttcatcttcatggcgataatgtgcatctggcactatggcaccatcaagaagtatgagttcgatctccagaacaaggtctccatcaactggctccttggcctcagccccaacctcggcattgtccgagtccgcggcatcggcctcatccacaccgagctcgactctgggatcccggcaatcttctcgcatttcgtcaccaacctacctgcatttcatcaagtgctcatcttcctctgcatcaagaacgtcccgataccgcatgtctcgccggaggagaggttcctcgtcggaagaattggccccaaggagtacagaatctaccggtgcattgtcaggtacggctaccacgacgtgcacaaggacgatcaggagttcgagaaggagctcgtctgcagcgtcgcggagttcatccgctccggcgccgccgccgcggccgacgccgcggcctcttccaagcccaagaacgtctgcggcggcggcgcggaggagtcggagaaagaggaggaggagcggatgtccgtcatcccctccggcagcattcggatgatggaggaggacggcggcgcgggggcgccgtcgtcggaggacaccgtcggcggcagcggcagcggcagcggcagaggcagctcgcgcggcggcggcggcgcaagggagatcatgtcgccgtcgccgtcgccgccgccggtggtggtggcgccgaggaagagggtgcggttcgtgctgccggcggcgagcccgcggccggacgccggcgtgcgggaggagctgcaggagctgatggacgcgcgcgaggccggcatggcgttcatcctcggccactcctacgtcaaggccaagagcggctccagcttcttccggcggctggtcatcaacttctgctacgacttcctccgccgcaacagccgcggccccaactacgccgtcaccatccctcacgcctccaccctcgaggtcggcatgatttactatgtctaa

SEQ ID NO: 4167 - DNA, 2379 bp, Sorghum bicolor
atggatcccgagttcggcgtcggcacggcgccacgaaagagggaggcatggcggacgacgctgctgctggcgtaccagagccttggcgtggtgtacggcgacctcagcatctcgccgctgtacgtgtacaagagcaccttcgccgaggacatcacgcactcggagggcaacgaggagatctacggcgccctctccttcgtcttctggacgctcaccctcatcccgctcctcaagtacgtcaccatcgtcctgcgcgcccacgacaacggcgaaggtggcaccttcgccctctactccctcatctgccgccacgccaatgtctgcctcctccccaaccgccagctcgccgaccaggacctctccacctacagcctccagcgcccgcacgacgccgccgggacctgtgcaccctcaccagtcaaggcctggctcgagaaccacaccaaactgcacaccgcgctgctcgtcatggtcatgatcggaacatgcatggtcatcggcgacggcgtcctcacccccgccatctccgtcttctccgccgtctcagggctcgagctctccttgtccaaggatcagcatgaatatgccgtcattccgataacatgcgccatactagtattcctgtttgcgctccagcactacggcacccaccgcgtagggttcctcttcgcgcccatcatcctcgcctggctgctctgcatgagcaccatcggcctgtacaacatcatccgctggaatccccagatctacacggcgctcaacccctcctacatgatccgattcctcaggaagaccaagaagtctggctggatgtccctgggaggaattctgctgtgcatgacaggatccgaagcaatgttcgccgatcttggacacttctcctacagctcgatccagcttgccttcacttctttagtgtacccttcactgatcctgggatacatgggccaagctgcttatttgtcccagcaccataaccttgacgcaagctaccaaatcggattctacattgcagttcctgagagtgtaaggtggcctgtgctagtgctggcgatcttggcatctgtggtcggcagccaagcgatcatcagcggcacgttctccatcatcaaccagagccagtctctgagttgcttccccagggtgaaagttgtgcacacgtctgacaaagttcatggccagatatacatcccggaggtcaactggatcctcatgatcctctgcgttgctgtcactgttggtttccgtaacaccaagcacatgggaaatgcatctggcctggccgtgatcacggtgatgctggtgacgacgtgcctcatgtccctggtgatcatgctgtgctgggaccgatccccatggctggcgctcgccttcttcctcttcttcggctccatcgaggcgctctacttctcggcgtcgctgatcaagttcctggaaggcgcgtggctgccgatcttcctggcactcatcctgctcgccatcatgttcgtgtggcactacaccacgatcaggaagtacgagtacgacatgcacaacaaggtgaccctggagtggctgctggcgctgggcgacaagctaggcatggtgcgcgtcccgggcatcggcctcgtctacaccgacctcacctccggcgtgccggccaacttctcccgcttcgtcaccaacctgccggcgttccaccgggtgctggtctttgtctgcgtcaagtccgtgacggtgccgcacgtgctccccgccgagcgctacctggtcggccgcgtcggcccgccgggccaccgctcctaccgctgcatcgtgcgctacggctaccgcgacgtgcaccaggacgtggactccttcgagacggagctcgtcgagagcctcgccacgttcatcaagctggacgcgctgttccgctgcagcgacgccggcggcgagcagcgggacagcagctactacgagcgcgagaacgcgctgacggtcatcgggagcaacccgctgcggcgccacatgagcctgggctacgacgactcccactcccacgacgacggcgcgtcgtctgactctgacagcgtggacggcatagagctcgcggcgtcggcgccggctccggcggccgtcaagaagcaggtgaggttcgcggtgccgccgcccaggagccccggggtggacgagagcgtgctggaggagctgcacgagctgtgcgaggcgcgggaggccggcacggcgttcatcctggggcactcgcacgtgaagaccaagcccgggtcgtcgttgctcaagaggctggccgtcggcgtcggctacaacttcctgcgccggaactgccgcggcccggacgtggcgctgcgcgtgccgccggcgtcgctgctcgaggtgggcatggtgtacgtgctgtga

SEQ ID NO: 4168 - DNA, 2614 bp, Zea mays
cggcattgctcgcatcgcctgccctgccctgccccccatgcgtgttgtgcgcatgaacagaggctaggctaccaacaacgcatagcatagccatggatcccgagttcggcgtcggcacggcgccacaaaaggggcggcgggcgtggcggacgacgctgctgctggcgtaccagagcctcggggtggtgtacggcgacctcagcatctcgccgctgtacgtgtacaagagcaccttcgccgaggacatcacgcactcggagaccaaccaggagatcttcggcgcgctctccttcgtcttctggacgctcaccctcgtcccgctcctcaagtacgccaccatcgtcctgcgcgccgacgacagcggcgagggcggcacgttcgcgctctactccctcatctgccgccacgccaatgtcagcctcctccccaaccgccaggtcgccgacgaggagctctccacctacaggctggagcgcccgcgcgaggccgccgggaggtccggcctgctcagggcgtggctggagaagcacacgaggctgcacaccgcgctgctcgtcatggtcatgatcggcacctgcatggtcatcggcgacggcgtcctcacgccagccatctccgtgttctccgccgtctcagggctcgagctctccctgtccaaggatcagcatgaatatgccgtcatcccgataacctgcgccatactggtgttcctgttcgcgctgcagcactacggcacccaccgcgtggggttcctcttcgcgcccatcatcctcgcctggctgctctgcatgagcgccatcggcctgtacaacatcgtccgctggaacccccagatctaccaggcactcaaccccgtctacatgatcaggttcctcaggaagaccaagaagtccggctggatgtcactgggaggaattctgctgtgcatgacagggtcagaagcaatgttcgcggatcttggacacttctcctacagcgccatccagcttgctttcacttctctagtgtacccttcactgatcctgggttacatgggccaagctgcttatctgtcccagcaccataaccttgacgcaagctaccagatcgggttctacattgcagttcctgagtgtgtacggtggcctgtgctggtgctggccatcttggcgtccgtggtgggcagccaggccatcatcagcgggaccttctccatcatcaaccagagccagtctctgagctgcttccctagggtgaaagtcgtgcacacgtctgacaaagttcatggccagatatacatccctgaggtcaactggatcctcatgatcctctgcgttgctgtcactgttggtttccgtaacaccaagcacatggggaacgcgtctggcttggccgtgatcacggtgatgctggtgaccacgtgcctcatgcccctggtgatcatgctgtgctgggaccgctccccctggctggccctcgccttcttcctcttcttcggctccatcgaggcgctctacttctcggcgtcgctgatcaagttcctggacggcgcgtgggtgcccatcctcctggccctcatcctgctcgccgtcatgttcgtgtggcaccacaccaccatcaggaagtacgagtacgacatgcacaacaaggtgaccctggagtggctgctggcgctgggcgacaagctgggcatggtgcgcgtcccgggcatcggcctcgtctacaccgacctcacctccggcgtgcccgccaacttctcccgcttcgtcaccaacctgccggcgttccaccgggtgctggtcttcgtctgcgtcaagtcagtgccggtgccgcacgtgctccccgccgagcgctacctcgtcggccgcgtcggcccgccgggacaccgctcctaccgctgcatcgtgcgctacggctaccgcgacgtgcaccaggacgtggactccttcgagacggagctcgtcgagagcctcgccacgttcatcaagctggacgcgctgttccgctgcagcgacgccgccggcgaccagcagcgggacagcagctactacgagcgcgagaacgcgctcacggtcatcgggagcaacccgctgcggcgccacctggccctgggctacgacgactcccactcccacgacgacggcgcgtcgtcagctggctctgaccgcgtggacggcatagagctcgccgcggcggcgccggcgccggcggtcgttaagaagcaggtgaggttcgcggtggctccgcccaggagccccggtgtggacgagaccgtgctggaggagctgcacgagctgtgcgaggcgcgcgaggccggcacggcgttcatcctgggccactcgcacgtgaagaccaagcccgggtcgtcgatactcaagaggctggccgtcggcgtcggctacaacttcctgcgccggaactgccgcggcccggacgtggtgctgcgcgtgccgccggcgtcgctgctcgaggtgggaatggtgtacgtgctgtaaccagaacgtggcggtgatgggtgactgcgatctctgcgtccggttttcgctgcgtgaactacggatctctctgctgtctgatgtgctattagagcatctccaacaacgtgacctataaaaatgtcttataatttaaaaat

SEQ ID NO: 4169 - DNA, 1954 bp, Zea mays
cttcgtcttctgtcactgtcccacactcctatcattctcgccttcgacttcccaggagcgcccagcgccgcggagcttctagaacacgcgactggggcgagctagacgaagctaaggaggcgcgaggggtgacgatgcggggcaggtgacggtgcggcgtggtggaggcgggacagaggccgggggatggtggcggcggagggtgggcccgtcgaggagggcgtcggggagagctcgtccccgccgcgcgtagacgcagccccagcgccctctggctccgttgggagcgggggcagaggaggcgccagcgacatctgcgccgaggtgctcgagcgcctcgtcgccgacggccacgcggaggcgtccgaccccgagttccgcgacaggctcgccgcacatttcgggcggctcccgcacagctatcagctggatatcaatgttgacaaagcaaccgatgtcttggtccaccagaatgtcttagcggaagcaaaggatcctgataggcgccctgcattctatgttcgtttcttgaggattgaagatattgatcctgcaaacgactccgatgcatctgaagaaggggatggtgatggtgatgatctctctgtaaggcaggacacaccatatactcacattcatgaggtagtattctccacaatcgacaagccaaagctccttagtcagctatctgcattgctatctgacattggattgaacatcagagaagcacatgttttctctactcatgatggctattctcttgatgttttcgttgttgatggctggcccattaaggatactgatggtttgcacaaagcactggaagcatccattttaagaaatgagggttcatggtctggttcatctcattcgtcagcagctgaaagaacactgcccttccaagttaaaggtggtgaatgggaaatcgataaacgacttctgaagatgggagggttgattgcttctggttcttgtggggacttgtatcacgggacttacctcggtgaggatgtagctgttaaagttctaagagctgagcatttgaataagaatgtttggaacgaatttactcaagaagtatatatactaagagaagttcaacatacaaatgttgtgcgattcattggtgcttgcacaaaaccaccacaattttgcataattacagaatacatgtctggaggaagcttatatgactttgtgcacaagcagcataacgttctaaacctcacgactctattgaagtttgcagttgatgtatgccgagggatgtgctacttgcatgaaaggggtatcatccatagagacttaaagactgccaaccttctaatggacaacgatcatgctgtgaaagtggctgattttggcgtagctcggttccaggatcaaggaggtatcatgacagctgaaactggaacatacagatggatggcgcctgaggttataaaccaccaaccctatgatagcaaagcagatgtgttcagctttgccattgttctctgggagctgataacgtccaagatcccatatgataccatgacccctctccaagcggctgtaggtgtgagacaggggttgcgcccaggacttccgaagaagacgcacccaaagctgttggacttgatgcagagatgttgggaagcagatccatccgaccggcctgctttctcggacattttagccgaactggaggatcttttggcacaagctcagggaacatcgggaaagacggtccaagatccatcaaactcgaacgcgaaagattaacccccatgccatgcacatacctgacattttttctcaatccagtgatttgccacatctaggattcgagttgccaattatgaggaaatttgttttgcttgtgtacattcgaacaatcttcttggggcctattttttatgggcacctcattattcttatacaaaagaaattgggcccaaaaaaaaaaaaaaaa

SEQ ID NO: 4170 - DNA, 1860 bp, Zea mays
ccttcgacttcccaggagcgcccagcgccgcggagcttctagaacacgcgactggggcgagctagacgaagctaaggaggcgcgaggggtgacgatgcggggcaggtgacggtgcggcgtggtggaggcgggacagaggccgggggatggtggcggcggagggtgggcccgtcgaggagggcgtcggggagagctcgtccccgccgcgcgtagacgcagccccagcgccctctggctccgttgggagcgggggcagaggaggcgccagcgacatctgcgccgaggtgctcgagcgcctcgtcgccgacggccacgcggaggcgtccgaccccgagttccgcgacaggctcgccgcacatttcgggcggctcccgcacagctatcagctggatatcaatgttgacaaagcaaccgatgtcttggtccaccagaatgtcttagcggaagcaaaggaccctgataggcgccctgcattctatgttcgtttcttgaggattgaagatattgatcctgcaaacgactccgatgcatctgaagaaggggatggtgatggtgatgatctctctgtaaggcaggacacaccatatactcacattcatgaggtagtattctccacaatcgacaagccaaagctccttagtcagctatctgcattgctatctgacattggattgaacatcagagaagcacatgttttctctactcatgatggctattctcttgatgttttcgttgttgatggctggcccattaaggatactgatggtttgcacaaagcactggaagcatccattttaagaaatgagggttcatggtctggttcatctcattcgtcagcagctgaaagaacactgcccttccaagttaaaggtggtgaatgggaaatcgataaacgacttctgaagatgggagggttgattgtttctggttcttgtggggacttgtatcacgggacttacctcggtgaggatgtagctgttaaagttctaagagctgagcatttgaataagaatgtttggaacgaatttactcaagaagtatatatactaagagaagttcaacatacaaatgttgtgcgattcattggtgcttgcacaaaaccaccacaattttgcataattacagaatacatgtctggaggaagcttatatgactttgtgcacaagcagcataacgttctaaacctcacgactctattgaagtttgcagttgatgtatgccgagggatgtgctacttgcatgaaaggggtatcatccatagagacttaaagactgccaaccttctaatggacaacgatcatgctgtgaaagtggctgattttggcgtagctcggttccaggatcaaggaggtatcatgacagctgaaactggaacatacagatggatggcgcctgaggttataaaccaccaaccctatgatagcaaagcagatgtgttcagctttgccattgttctctgggagctgataacgtccaagatcccatatgataccatgacccctctccaagcggctgtaggtgtgagacaggggttgcgcccaggacttccgaagaagacgcacccaaagctgttggacttgatgcagagatgttgggaagcagatccatccgaccggcctgctttctcggacattttagccgaactggaggatcttttggcacaagctcagggaacatcgggaaagacggtccaagatccatcaaactcgaacgcgaaagattaacccccatacctgacattttttctcaatccagtgatttgccacatctaggattcgagttgccaattatgaggaaatttgttttgcttgtgtacattcgaacaatcttcttggggccaattttttatgggcacctcat

SEQ ID NO: 4171 - DNA, 1881 bp, Zea mays
cgacgcttctagaacacgcgacgcgggcgagcgcgctggcgggtgggcgaggcaaaactaaggaggcgggaggggcggcgatgcggggcaggtgacgctgcggcgcggcgtgggggatggtggcggcggagggtgggcccggcggggccgtcgaggagggcgtcggggagagctcgtccccgccgcgcgaggacgccgtcccagcgcccgccggctccggcgggagcgggggcagcggaggcgcccgcgaaatctgtgcccaggtgctcgaccgcctcgtcgccgacggctacgcggaggcgtccgaccccgagttccgcgacaggctcgccgcccatttcggccggctcccgcacagctatcagctggatatcaatgttgacaaagcatccgatgtcttggtccaccagaacgtcttagcggaagcaaaggatcctgataggcgccctgcattctatgtccgtttcttgaggattgaagatatggattcagcatacgactccgatgcatctgaagaaggggatgatgatggtgatgatctctctgtaaggcagggcacaccatatactcacattcatgagatagttttctccacaatcgataagccaaagctccttagtcagctatctgcattgctatctgacattggattgaacatcagagaagcacatgttttctctacccatgatggctattctcttgatgtttttgttgttgatggctggcctgttcaggatgctgatggtttgcacaaagcactggaagcatccattctaagaaatgagggttcatggtctggttcatctcattcctcagccgctgaaagaacactgcccttccaagttaaaggtggtgagtgggaaatcgacaaacgacttctgaagatgggagggatggttgcttctggttcttgtggggacttgtatcacgggacttaccttggtgaggatgtagctgttaaagttataagagctgagcatttgaataagaatgtttggaacgagtttacgcaagaagtatatatactaagagaagttcaacataaaaatgttgtgcgattcattggtgcatgcacaaaaccaccccaattttgcataattacagaatacatgtctggaggaagcctatatgactttgtgcacaagcagcataatgttctaaacctcaggactttattaaagtttgcagttgatgtatgccgagggatgtgctacttgcatgaaaggggtatcatccatagagacttgaagactgcaaaccttctaatggacaaagatcatgttgtgaaagtggctgattttggtgtagctcggttccaggatcaaggaggtgtcatgacagctgaaactggaacatacagatggatggcacctgaggttataaaccatcaaccctatgataacaaagcagatgttttcagctttgctattgtcatctgggagctgataacgtctaagatcccgtatgaaagcatgacccctctccaagcggctgtaggtgtgagacagggattgcgcccaggacttccaaagaagacgcatccaaaggtattggacttgatgcagagatgctgggaagcagacccatctgcccggcctgctttcccagacattttagccgaactggaggatcttttggcacaggttcagggaacaccgggaaagacggcccatgctccatcaaataactcgaacacgaaagattaacccccatgcacacatacctgacgtttttctgaattcagtgatctgccatgtttaggattcgagtcgctaattacgaggaatgtagcatatcgatttttttccctggatggttttgcttgtgtacatttgaacaatcttcttggggcctattttttatggtcacctcattgttctt

SEQ ID NO: 4172 - DNA, 2062 bp, Hordeum vulgare subsp. vulgare
gaagtgctccaactacccagtagtgcccaccaacccgcgaaccttctagaacacgccgtcggttgagcgggacggaaccctagatgagcgccggagcttggaggggacggacgatgcgcgccggttgacccgctcgggcggcggcggagggtttgcggggggatggcagtggcagctgagggtgggggcgtggaggagggcgtgggggagagctcttctcctccgcgtagcgcgccgcccgcgcctgccgtgtcgggcgggagcggcggaggcgggggagccccccgcgacatctgcacccaggtgttcgagcggctcgtcgccgacggcaacgaggaggcggcaggccccgacttccgcgtccagctcgaggcccatttcgcgcggcttccattcagctatcaacttgatatcaatgtcgacaaatcagcagatgtcttggtccatcagaaggtcttggcggaagcaaaggatcctctgaggcgccctgctttccgcgtccgtttcttgagggttgaagacatggattcagcatatggctctgatgcatctgacgaaggggctgatgatggtgatgatctctctgtaaggcaggacacaccttacacacacattcatgagatagttttctccacaattgacaagccaaagctccttagtcagctgtctgccttgctatcagacattggactgaacatcagggaagcacatgttttctctaccgtagatggctattctcttgatgtttttgttgttgatggttggcccattgaggacaccgatggtttacataaggcgcttgaagcatctgttttaaggaatgagggttcatggtctggttcatctcactcctcagctgcagaaagaacactgccattccaggtaaaaggtggggaatgggaaattgacaaacggcttctgaagatgggagagatgattgcttctggttcttgtggagacttgtttcatgggacttacttcggcgaggatgttgctgttaaagttctaaaagccgagcatttgaataataatgtttggaatgagtttacacaagaagtatatattctaagggaagttcatcatacaaatgttgtgcgattcattggtgcatgcacaaaaccaccaaaattttgcataattacagaatacatgtctggaggaagtctgtatgattatgtgcacaagcagcgtaatgtcgttgatctccctactctgctgaagtttgcatgtgatgtatgtcgagggatgtgttatttgtatcagaggggtattatccacagagacttaaagacagcaaaccttctaatggacaaagatcatgttgttaaggtagcagattttggtgtagctcggttccaggatcaaggtggtatcatgacggctgaaactggaacatacagatggatggcgcctgaggttataaatcatcaaccctatgataacaaagcagatgtatttagtttcgctattgtgctttgggaactcctcacgtccaagatcccatatgataccatgacacctctgcaagcagctgtaggtgtgaggcaggggctgcgcccagtgctgccagaaaagacacatcccaagctattagatctgctgcagagatgttgggagaccatcccatcgaatcggcctgctttcccagatatattaactgaactagagggtcttctggcaggagttcagggaacttcaggtgaatcgagcgaacaaccgaaggatatctcggcctcgacagactgaccctctgcacatacctgacatttttctcgttctcccgttggcccaattactaggatccggaacactgatgttgaggaatgtagcatatcatttttggttttggtttactttttgttatgtacaatttgaacagtcatctttgggcctaatgtttttttttcaggctgtgtttcactgttactacaaagaaaatcgaattatctgttcagtatactggtcatagctttggtatgtaaacatgtgccctagattatactgctttggccagttcttttctggtgaatacagccaaatgtggaaatcatggttcatcttc

SEQ ID NO: 4173 - DNA, 1956 bp, Hordeum vulgare subsp. vulgare
gtagtgctccaactacccagtagtgcccaccaacccgcgaaccttctagaacacgccgtcggttgagcgggacggaaccctagatgagcgccggagcttggaggggacggacgatgcgcgccggttgacccgctcgggcggcggcggagggtttgcggggggatggcagtggcagctgagggtgggggcgtggaggagggcgtgggggagagctcttctcctccgcgtagcgcgccgcccgcgcctgccgtgtcgggcgggagcggcggaggcgggggagccccccgcgacatctgcacccaggtgttcgagcggctcgtcgccgacggcaacgaggaggcggcaggccccgacttccgcgtccagctcgaggcccatttcgcgcggcttccattcagctatcaacttgatatcaatgtcgacaaatcagcagatgtcttggtccatcagaaggtcttggcgggagcaaaggatcctctgaggcgccctgctttccgcgtccgtttcttgagggttgaagacatggattcagcatatggctctgatgcatctgacgaaggggctgatgatggtgatgatctctctgtaaggcaggacacaccttacacacacattcatgagatagttttctccacaattgacaagccaaagctccttagtcagctgtctgccttgctatcagacattggactgaacatcagggaagcacatgttttctctaccgtagatggctattctcttgatgtttttgttgttgatggttggcccattgaggacaccgatggtttacataaggcgcttgaagcatctgttttaaggaatgagggttcatggtctggttcatctcactcctcagctgcagaaagaacactgccattccaggtaaaaggtggggaatgggaaattgacaaacggcttctgaagatgggagagatgattgcttctggttcttgtggagacttgtttcatgggacttacttcggcgaggatgttgctgttaaagttctaaaagccgagcatttgaataataatgtttggaatgagtttacacaagaagtatatattctaagggaagttcatcatacaaatgttgtgcgattcattggtgcatgcacaaaaccaccaaaattttgcataattacagaatacatgtctggaggaagtctgtatgattatgtgcacaagcagcgtaatgtcgttgatctccctactctgctgaagtttgcatgtgatgtatgtcgagggatgtgttatttgcatcagaggggtattatccacagagacttaaagacagcaaaccttctaatggacaaagatcatgttgttaaggtagcagattttggtgtagctcggttccaggatcaaggtggtatcatgacggctgaaactggaacatacagatggatggcgcctgaggttataaatcatcaaccctatgataacaaagcagatgtatttagtttcgctattgtgctttgggaactcctcacgtccaagatcccatatgataccatgacacctctgcaagcagctgtaggtgtgaggcaggggctgcgcccagtgctgccagaaaagacacatcccaagctattagatctgctgcagagatgttgggagaccatcccatcgaatcggcctgctttcccagatatattaactgaactagagggtcttctggcaggagttcagggaacttcaggtgaatcgagcgaacaaccgaaggatatctcggcctcgacagactgaccctctgcacatacctgacatttttctcgttctcccgttggcccaattactaggatccggaacactgatgttgaggaatgtagcatatcatttttggttttggtttactttttgttatgtacaatttgaacagtcatctttgggcctaatgtttttttttcaggctgtgtttcactgttactacaaagaaaatcgaattatctgttcagt

SEQ ID NO: 4174 - DNA, 2015 bp, Zea mays
aaaacagaattccacgacgtctcacctgcacacgcgctcgtcgtcgtctcatcggcgcttgctgcgacaactcacgccggtggcttgagcgcgccatcgaccagggttgttacaccaagcgatggcggcggtggccggggatggtggtggtgggcccgaggagggcgtcggcgagagctcgtccccgcctcgcaaccccgtgctcgcgcccgcacccgctgcctctggcgggagcgggagcggtggcggcggccgcggaggtggcctccgggacatctgccgcgaggtgttcgagcgcctcgtcaacgatggccacagggcgggctccgagctccttgcccagctcgaggcccacttcaatcgactccccatcagctacaagctggatgtgaatattgacaaagcagaagatgtgttaatccatcagaaagttttggcagaagcacaggatcctgataggcgcccagcattcactgtccgtttcctcaggcttgaagaggtaaatgtggacgagacaactaactctgatgcacatgaagaaggggctgatattggtgaagctctttctaccaggtcaaagacatcatatgcacacattcatgagatactattctccaccaaggataaacccaagctcctgagtcagttgtctgctttgctttctgacattggactgaacatcaaggaggcacatgtgttctcaacaacagatggttattctcttgatgtttttgttgttgacggttggcccgttgaggaaactgatggtttgcataaggcactagaagtatcaattttgagaaatgagggttcctggtctggctctgaatcctcagcttccaaaagatcactgccattcctagcacaggattttgaatcagatattgacacaagacttctgaagcttgtaaataagattgcttctggatcttgtggggacatgtttcttgggacctacagtggtgaggaggttgctgttaaagttcttaatcctcagaatttgaacaaaaatgtatggagtgaatttaagcaagaaatcaacatgttaagggaagttgatcatccgaatattgtccgattcattggttcatgcacaaagccacctcagttttacataattacagagtgcatgtctagaggaagtctgtttgatttcttgcacaatgagcataatgtgttggacctcccaacgcttctgaagtttgcactagatgtatgccaagggatgtcctacttgcatcagaaaggcattatccacagagatttaaagtctggcaaccttttattggataaaaatgatgttgttaaagtagccgattttggtctagctcgttttcaggatggagggggtgatatgactgctgaaactgggacctatagatggatggcacctgaggttataaatcatcagccctatgacagcaaagcagatgtatacagttttgctcttgtactttgggagctcatgacatccaagattccatataataccatgacccccctccaagcagctgttggtgtgaggcagggattgcgaccacaaattccagaaaatacgcatccgaggctcataaacttgatgcagagatgttgggaagctactccgactgatcgcccttcatttgaggagatcattcctgaactagaggatatccaggcacaagcacagagaacatcaggggaaacgagccagacagaggaggaccactcatgcagtaaagattgattgaccccctctgtacatacatgttgacaattctctcatctgatcactaaaatgctgagaaagtagcatatcatcagttttgatgccatagaaaaaaagtagcgaatcattttgtcaagttttgtcagaaccttttggggccgacggccaaagctcttggtattatccttgcttcactcttaggtcccatttttcctgatatgatgatatctttgagttgcggcttgatatatgtgaatatttgaatgagaaatttactgctgcttgtcaaataaaaaaaaaaaaaaaa

SEQ ID NO: 4175 - DNA, 1695 bp, Sorghum bicolor
ccagcgatggcggcggcggctgcggcgggagatggcggtggtggtgggcctgaggagggcgtcggcgagagctcgtccccgcctcgcgaccccgcgcccgcgccctcgccctcgcctgctgcctctggtgggagcggtggcggcggccgcggcgggggcctccgcgacatctgccgcgaggtgttcgagcgactcgtcagcgatggccacgcggcgggctccgagctcctcgcccagcttgaggcccacttcaatcggctccccatcagctacaagctggatgtgaatattgacaaagcagaggacgtgttattccatcagaaagttttggcggaagcgaaggatcctgataggcgtccagcgtttgctgtccgtttcctcagggtaactattttttcttcctgcgttatgtgtcgtatggagctgggttttgttcacattcagcaagcagttaagcttgaagaggtaaatgtggacgagacaactaactctgatgcacatgaagaaggggctgataatgatgaagctctttctaccaggtcaaagacatacacacacattcatgagatactattctccactaaggacaaacccaagctcctgagtcagttgtctgctttgctttctgacatcggactgaacatcagggaggcacatgtgttctcaacaacagatggttattctcttgatgtttttgttgttgacggttggcccatcgaggaaactgatggtttgcataaggcactagaagcatcaattttgaggaatgagggttcatggtctggctctgaatcctcagcttccgaaagatcgctgccattcctagcacaggattgtgaaacagatattgacacaagacttcttaagattgtaaagaaggttgcttctggatcttgtggggacatgtttcttgggacctacagtggtgaggaggttgctgttaaagttcttaatcctgagaatttgaaccaaaatgcatggagtgaatttaagcaagaaatctacatgttaagggaagttgatcatccgaatattgtccgattcattggttcatgcacaaagccacctcagttttacataattacagagtgcatgtctagaggaagtctgtttgatttcttgcacaatgagcataatgtgttggacctcccaatacttctgaagttcgcactagatgtatgccgtgggatgtcctacttgcatcagaaaggcattatacacagagatttaaagtctgccaaccttttattggataaagatcatgttgttaaagtagcagattttggtctagctcgttttcaggatggagggggtgctatgactgctgaaactgggacctatagatggatggcacctgaggttataaatcatcagccctatgacaacaaagcagatgtctacagttttgctcttgtactttgggagctcatgacatccaagattccatataataccatgagccccctccaagcagctgttggtgtgaggcagggattacggccacaagttccagaaaatgcgcatcccaggctcataagcttgatgcagagatgttgggaagctattccgactgaccgcccttcatttgcggagatcattcctgaactagaggatattcgagcacaagcgcagagaacatcaggggagacgagccagaaacagaaggacgacggcccaggcagtagtaaagattga

SEQ ID NO: 4176 - DNA, 2630 bp, Sorghum bicolor
atgaagagctcgagcagcgccggcggcagctctggcacgggcacgggctcgagatccggctctgggtccttcaacctccggaacctgtccaaggtcatcctcccgccgctcggcgggccgtccggccaaagccagtcccatggcgggtcggacaagtgggtcatctcgccgctcgactccagatacagatggtgggatacgttgatggtggtcctggtggcgtactcggcgtgggtgtacccgttcgaggtggccttcatgaacgcgtcccccaagggcgggctggaggtggcggacatcgtcgtcgacctcttcttcgccgtcgacatcgtgctcaccttctttgtcgcctacatcgaccataggacccagctcctcgtccgtgacaggaggaagataaccctcaggtacctgtcgacgttcttcatcatggacgtggcatcgacgatcccgttccagggccttgcctacctcgtcaccggcgaggtcagggagaacgccgcgtacagcatgctgggcgtcctacgcctctggcgtctccgcagggtgaagcagttcttcaccaggctcgagaaggacatccgcttcagctacttctggatccgctgcgcgcgcctcgtcgcggtgaccctgttcttggtccactgcgccggctgcctgtactacctgatcgccgaccggtacccgcaccgggagaagacgtggatcggcgcggtgatccccaacttccggcaggccagcctgcggatccgctacatctcctccatctactggtccatcaccaccatgaccaccgtcggctacggcgacctgcacgccgagaacaccgtcgagatgatcttcaacatcttctacatgctcttcaacctcgggctcaccgcctacctcatcggcaacatgaccaacctcgtcgtcgagggcacgcgccgcaccatggaatttaggaacagtatcagggcggcgtcgagctttgtgggccggaaccacctgccgccacggctgaagcagcagatcctggcctacatgtgcctcaagttcagggccgagagtctgaaccagcagcagctcatggaccagctacccaagtccatctgcaagagtatctgcgagcacctcttcgtgccggtcgtcaaggacgtctacctcttcaacggggtctcaagagaaatgctcctgtccctggtcaccaagatgaagccggagtacatcccgcccaaggaggacgtgatcgtgcagaacgaggctccggacgacgtgtatgtcgtcgtctccggcgaggtggaggtcatactgttcaacggcatcgatgagcacgtgaaggcgacgctggggacacgggacatcttcggcgaggtgagcgcgctgagtgaccgggcgcaggccttcacgttccggacgaggacgctgagccagctgctgcggctgaagcaggccactctcaaggaggccatgcagagcaggcccgaggacagcgtcgtcatcatcaagaactttctcaagcatcaggtcgagatgcatggcatgaaggccgatgacttgctgggagacaacactggcgagcacgacgacgacgcgaatgtgctgacggtcgccgcgatgggaaacagcggcttactcgaggacctcctcagggcagggaaggacgctgacgtcggcgacgccaagggcagaacagcactgcacatcgcggcgtccaatgggtacgaggactgcgtgctggtgctgctcaagcacgcgtgcaacgtgaacatcaaggacgcacagggcaacacggcgatgtggaacgccatcgcagcggggcaccacaagatcttcaacatcctgtaccactttgcgcgcgcgtccaacccgcacgccggaggagatgtcctgtgcttcgccgcgcgccgcggcgacctcggcgcgctccgggagctcctcaagctcggccttgatgtggactcggaggaccacgacggcgccaccgcgctgcgcgtcgcgatggccgagggacacgccgacgcggccaggttcctgatcatgaatggggccagcgtggacaaggcgagcctcgacgacgacggctccggctctggcgccgcgcggctaacaatgtcgccgaccgagctgcgcgagctactgcagaagcgggagctcggccactcgataaccatcgttgactcgccagcggtgatcccggacggcggctcgtcggggcacagccgtccaggaagattacagggcacaagctcggacaaccaatgctggcctcgggtgagcgtatacaagggtcaccctttcctcagaaaccgcagctctgaagctggcaagctgatcaatctgcctggcaccttggaagaattcaaagccatcgtcggtgagaaattgaaagttgatgcgaagaagggtctgatcgtgaacgacgaaggagcggagatcgactccatcgacgtgatccgggacaacgacaagctgttcgtggtcaccgaagaagatctgaggaggctggcatcaatggactcgctgtcttcttcatagcgtttgtagatccaggttttgtcatagcagcagtcacacacggtagatgtgcatccaaccaagagtattgtatgttgaaataaccgagtcatctctatacatgcaattacgac

SEQ ID NO: 4177 - DNA, 2550 bp, Zea mays
atgaagaagaacaactcgagcattgagagcacgggcggcggcgtcggcggctccggcggcacggtgtcgggatccggctccggctccttcaacctccggaacctgtccaaggtcatcctcccgccgctcggcgggccgtccggcggccaaagccagtcgcatggcgggtcggacaagtgggtcgtctcgccgctcgactccagatacaggtggtgggatacgttcatggtggtcctggtggcgtactcggcgtgggtgtacccgttcgaggtggccttcatgaacgcgtcccccaagggcgggctggaggtggcggacatcgtcgtggacctcttcttcgccgtcgacatagtgctcaccttcttcgttgcctacatcgacggcaggacccagctcctcgtccgtgacaggaagaagataacactcaggtacctatcgacgttcttcatcatggacgtggcatcgacgatcccgttccagggccttgcctacctcatcaccggcgaggtcagggaaaacgccgtgtacagtatgctgggcgtcctacgcctttggcgtctgcgaagggtcaagcagttcttcaccaggctcgagaaggacatccgcttcagctacttctggatccgcagcgcgcgtctcgtcgcggtgaccttgttcctggtccactgcgccgggtgcctgtactacctgatcgccgaccggtacccggaccggcagaagacgtggatcggcgcggtgatccccaacttccggcaggccagcctgcggatccgctacatctcttccatctactggtccatcaccaccatgaccaccgtcggttacggcgacctgcacgcccagaacaacgtcgagatgatcttcaacattttctacatgctcttcaacctcgggctcaccgcctacctcatcggcaacatgaccaacctcgtcgtcgagggcacccgccgcaccatggagtttaggaacagcatcagggcggcgtcgagcttcgtgggccggaaccacctgcctccgcggctgaagcagcagatcctggcctacatgtgcctcaagttcagggcggagagcctgaaccagcagcagctcatggaccagctgcccaagtccatctgcaagagcatctgcgagcacctcttcgtgccggtcgtcaaggacgtctacctcttcaggggggtctcaagagaaatgctcctgtccctggtcaccaagatgaaaccggagtacatcccgcccaaggaggacgtgatagtgcagaacgaggccccggacgacgtgtacgtcgtcgtctccggcgaggtggaggtcatactgttcgacggcatctacgagcaggtgcaggccacgctgggggcgcgggacatcttcggcgaggtgagcgcgctgagcgaccgggcgcaggctttcacgttccggacgaggactctcagccagctgctgcggctgaagcaggctacgctcaaggaggccatgcagagcaggcccgaagacagcgtcgtcgtcatcaagaacttcctcaagcatcaggtcgagatgcatggcatgaaggtcgaggacttgctgggagacaacaccggcgagcacgacgacgacgcgattgtgctgacggtcgccgcgatgggaaacagcggcttactcgaggacctcctcagggcaggcaaggccgccgacgtcggtgacgccaagggcagaacagcattgcacatcgcggcgtccaaggggtacgaggactgcgtgctggtgctactcaagcacgcgtgcaatgtgaacatcagggacgcgcagggcaacacggcgatgtggaacgccatcgcggcggggcaccacaagatcttcaacctcctgtaccaattcgggcgcgcgtcgaacccgcgcgccggcggagacgtgatgtgcctcgcggcgcgccgcggccacctcggcgcgctccaggagctcctcaagctcggcctggacgtggactcggaggaccacgacggcgccaccgcgctgcgcgtcgcgatggccgagggccacgcggatgcggccaggttcctgatattgaacggggccagcgtggacaaggcgagcctcgacgacgacggctcaggttcaggctccggctctggcgccgcgcggctagcaatgtcgcccaccgagctgcgcgagctgctgcagaagcgggagctcggccactcgataacgatccacgactcgccagcggtggtcccgaacggcggctcgtcggggcacagccgtccaggaagattacagagcacaagttcggacagccagcgctggcctcgggtgagcgtatacaagggccaccctttcctcagaaaccgcacctctgaagctggcaagctgatcaacctaccaggcaccatggaagaattcaaagtcatcgtcggtgagaaactgaaagttgacgcggagaaggcgttgatcgtgagcgacgaaggagcggagatcgactcgatcgacgtgatccgggacaacgacaagctgttcatggtcaccgaagaagatctgaggcggctggcatcaatggactggctgtcgtgcgagtga

SEQ ID NO: 4178 - DNA, 2799 bp, Zea mays
agtccagcacgctccagcgtaccacaagccgcgcatccaagctagtcctagatatagcacactagttgctgggcagcagcaggaagtcgcagcgttgcgtgatgaagaacaacccgagcttcgagaacacgtgcagcgccgccgccggcgggtccggctctggctccttcaacgtccggaacctgtccaaggtcatcctcccgccgctcggcgggccgtccggccagagccagtcccatggcgggtcggacaagtgggtcatctcgccgctcgactccagatacaggtggtgggacacgttgatggtagtcctggtggcgtactcggcgtgggtgtacccgttcgaggtggccttcatgaacgcgtccccgaagggcgggctggaggtggcggacatggtcgtggacctcttcttcgccgtcgacatcgtgctcaccttcttcgtcgcctacatcgaccccaggacccagctgctcgtccgcgacaggaagaagataaccctcaggtacctgtcgacgttcttcatcatggacgtggcatcgacgatcccgttccagagccttgcctacctcatcaccggcgaggtcagggagaacgccgcgtacagcatgctgggcgtcctacgcctctggcggctccgcagggtcaagcagttgttcaccaggctcgagaaagacatccgcttcagctacttctggatccgcagcgcgcgtctaatcgcggtgaccttgttcctggtccactgcgccgggtgcctgtactacctgatcgccgaccggtacccggacagggagaagacgtggatcggcgcggtgaaccccaacttccggcaggctagtctgcggatccgctacatctcctccgtctactggtccatcaccaccatgaccacagtcggctacggcgacctgcacgcccagaacaccgtcgagatgatcttcaacatattctacatgctcttcaacctcgggctcaccgcctacctcatcggcaacatgaccaacctcgtcgtcgagggcacccgccgcactatggagtttaggaacagcgtaaggacagcgtcgagtttcgtgggccggaaccacctgccgccgcggctgaagcagcagatcctggcctacatgtgcctcaagttcagggcggagagcctgaaccagcagcagctcatggaccagctgcccaagtccatctgcaagagcatctgcgagcacctcttcgtgccggtcgtcaaggatgtctacctgttcaagggggtctcaagggaaatgctgctgtccctggccaccaagatgaagccggagtacatcccgcccaaggaagacgtgatcgtgcagaacgaggctccggacgacgtgtacgtcgtcgtctctggcgaggtggaggtcgtactgttcgacggcgtcgacgagcgggtggaggcgacgctggggacgcgcaacatcttcggcgaggtgagcgcgctgagcgaccggccgcaggcgcccttcacgttccggacgaggacgctgagccagctgctgcggctgaagcaggccacgctcaaggaggccatgcagagctggcccgacgacagcgtcatcatcatcaagaattacgtcaagcatcaggtcgagatgcatggcatgaaagccgatgactcgctgggagacaacactagcgagcacgacgacgacgcgaatgtgctcacagtcgccgcgatgggaaacagcggcttactcgaagacctcctcagggcagggaaggacgctgacgtcggtgacgccatgggcagaacagcattgcacatcgcggcgtctaaggggtacgaggactgcgtgctggtgctgctcaagcacgcgtgcaacgccaacatcagggacgcgcagggcaacacggcgatgtggaacgccatcgcggcggggcaccacaagatcttcaacatcctgtaccactccgcgcgcgcgtcgaaccctcacgccggcggagacgtcatgtgcctcgccacgcggcgcggcgacctcgacgcgctccgggagctcctcaagctcggccttgacgtggactcggaggaccacgatggcgccactgcgctgcgcgtcgcgatggccgagggccacgcggacgcggcaaggttcctgatcacgaacggggccagcgtggacaaggcgagcctcgacgacgacggctccggctccggcgccgcgcggcttacaatgtcgccgacagagctgcacgagctgctgcagaagcgggagctcgtccactcgataaccatcactgactcgccaccggtggtcccggacggcggctcgtcggggcacagccgtccgggcagattacagagcacaggctcggacaacacgcgctggcctcgggtgagcatatacaggggccacccgttcctcagaaaccgcagctctgaagctggcaagctgatcaatctgccagccaccatggaagaattcatagccgtcgtcggtgagaaattgaaggttgatacggagaaggcgctgattgtgaacgacgaaggagcggaggtcgactcgatcgacgtgatccgggacaacgacaagctgttcgtggtcaccgaagaagatctgacgcggctggcaccaatggactcggtgccttcgtcatagcatttgtagattcaggtttttccgtagcaagtcacacggtagatgtgcacccaactaacaaaatgtgtattcctcggggtctcaagatagtcaatatttcatgtttttaaatacaactttttaaattttgatcgaatatatacagaaatactaaactttatggttaaaaaaaaaaaaaaaa

SEQ ID NO: 4179 - DNA, 2514 bp, Sorghum bicolor
atgaagaacaactcgagctttcagagcacgggcagcgccggcggcggcggcggctccggcacgggcgagagatccggctctgggtccttgagcctccggtacctgtccaagatcatcctcccgccgctcggcgggccgcccggccaaagccagtcccatggcgggtccgacaagtgggtcatctcgccgctcgactctagatacaggtggtgggatacgttgatggtggtcctggtggcgtactcggcgtgggtgtacctgttcgaggtcgccttcatgaacgcatcccccaagggcgggctggaggtggcggatatcgtcgtcgacctcttcttcgccgtcgacatcgtgctcaccttcttcgtcgcctacatcgaccccaggacccagctcctcatccgcgacaggaagaagataactttcaggtacctgtcgacgttcttcatcatggacgtggcatcgacggtcccgttccaggcccttgcctacttcatcaccggcgaggtcagggagaatggcgcgtacagtgtactgggtctcctacgcctatggcgtctccgtagggttaatcagttcttcaccaggctcgagaaggacatccgcttcagctacttctggatccgctgcgcgcgcctcgtcgcggtgaccctgttcgtggtccactccgccggttgcctgtactacctgatcgccgaccggtacccgcacccagagaagacgtggatcggcgatgtgatccccaacttccggcaggtcagcgtgtggatccgctacatcacctccgtctactggtccatcaccaccatgaccaccgtcggctacggcgacctgcacgccaggaacaccgtcgagatgatcttcaacatcttctacatgctcttcaacctcggtctcaccgcctacctcatcggcaacatgaccaacctcgtcgtcgagggcacccaccgcaccatggagtttaggaacagcatcagggccgcgacgagcttcgtgggccggaaccacctgccgccgcggctgaagcagcagatcctggcctacatgtgcctcaagttcagggcggagagcctgaaccagcagcagctcatggaccagctacccaagtccatctgcaagagcatctgcgatcacctcttcgtgccggtcgtcaaggacgtctacctcttcaatggggtctcgagagaaatgctcctgtccctggtcaccaagatgaaaccggagtacattccgcccagggaggatgtgatcgtgcagaacgaggctccggacgacgtgtacgtcgtcgtctccggcgaggtagaggtcatactgttcaatggcatcaacgagcgggtggaggcgacgctggggacgcgagacatcttcggcgaggtgagcgctctgagcgaccgggcgcaggccttcacgttccggacgaggacgctgagccagctgctgcggctgaagcaggcgacgcttaaggaagccatgcagagcaggcccgaggacaatgtcgtcgtcatcaagaacttcctcaagcatcaggtggagatgcatggcatggaagtcgaggacttgctgggagacaacactggcgagcacgacaacgacgcgaatgtgctgacggctgccatgatgggaaacagcggcttactcgaggacctcctcagggcagggaaggacgctgacgtcggtgacgccacgggcagaacagcactgcacatcgcggcggccaaggtgtacgaggactgcgtgctggtgctgctcaagcacgcgtgcaacgtgaacatcgaggacgcgcagggcaacacggcgatgtggaacgccattgcggcagggcaccacaggatcttcaacatcctgtaccagttctcgcgcgcgtccaacccgcacgccggcggagacgtcttgtgcctcgccgcgcgccgcggtgacctcggcatgctccgggagctcctcaagctcggcctggacgtggactcggaggaccacgacggcgccaccgcgctgcgcgtcgcgatggccgagggacacgccgatgtggcgaggttcctgatcatgaatggggccagcgtggacaaggcgagcctcgacgacgatggctccggctctggcacggcgcggcgaacaatgtcgtcgaccgagctgcgcgagctgttgcagaagcgggagctcggccactcgataaccatcgttgactcgccagcggtgatcccggacagattacagagcacaggctcgaaccagcaacgctggcctcgggtgagcatatataatggccaccctttcctcagaaaccgcagctatgaagctggcaagctgatcaatctgcctggcaccatggaagaattcatagccaccgtcggtgagaaattgaaagttgatgcggagaaggtgctgatcgtgaatgacgaaggagctgagatcgactccatcgacgtgattcgagacaacgacaagctgttcgtggtcaccggagaagatatgaggcagctggcatcaatggactccatgtcttcatcactgtgtttgtag

SEQ ID NO: 4180 - DNA, 2538 bp, Sorghum bicolor
atgaagaaaaactcgagctttcagagcacgggcagcgccggcggcggctccggcacgggcacgggctcgagatccggctccttcaacctccggaacctgtccaaggtcatcctcccgccgctcggcgggccgtccgccggccaaagccccaataatggtgggtcggacaagtgggtcatctcgccgctcgactccagatacagatggtgggatacgttgatggtggtcatggtggcgtactcggcgtgggtgtacctgttcgaggtggccttcatgaacgcgtcccccaagggcgggctggaggtggcggacatcgtcgtcgacctcttcttcgccgtcgacatcgtgctcaccttcttcgtcgcctacatcgaccccaggtcccagctcctcgtctgcgacaggaagaagataaccttcaggtacctatcgacgttcttcatcatggacgtggcttcgtcgatcccgttccaggcctttgcctacttcatcaccggcgaggtcagggaggatgccgtgtacagtgtgctgggcctcctacgcctgtggcgtctccgcagggtcaaccagttcttcaccaggctagagaaggacatccgcttcagctacttctggatccgcagcgcgcgcctcgtcgcggttggtagggtgaccttgttcgtcgtccactgcgccgggtgcctgtactacctgatcgccgaccggtacccgcactcggagaagacgtggatcggcgcggtgatcccaaacttccggcaggccagcctggggatccgctatatcaccgccatctattggtccatcaccaccatgaccaccgtcggctacggcgacctgtgcgcgaggaacaccatcgagatgatcttcaacatcttctacatgttcttcaacctcgggctcacctcctacctcatcggcaacatgaccaacctcgtcgtcgagggcactggccgcaccatggagtttaggagcagcatcagggccgcgtcgagcttcgtcggccggaaccacctgccgccgcggctgaagcagcagatcctagcccacatgtgcctcaagttcagggtggagaacctgaaccagcagcagctcttggacgagctgcccaagcccatctacaagagcatctgcgagcacctcttcgtgcctgtcgtcaaggacgtctacctcttcaacggggtctcaagagaaatgctcctgtccctggtcaccaagatgagaccggagtacatcccgcccaaggaggaggtgatcgtgcagaacgaggctccggacgacgtgtacgtcgtcgtctccggcgaggtggaggtcatactgttcgacggcatcgacgagcgggtggaggcgacactggggacgcgggacatcttcggcgaggtgagcgcgctgagcgaccgggcgcaggcgttcacgttccggacgaggacgctgagccagctgctgcggctgaagcaggccaccctcaaggaggccatgcagaataggcccgaggacagcgtcgtcgtcatcaagaacttcctcaagcatcatgtcgagatgcatggtataaatgtcgaggacttgctgattgacaacattggcgagcacgatgatgacgcgaatgtgctgacggtcgccgcgatgggaaacagcggcttactcgaggacctcctcagggcagggaaggacgccgacgtcggcgacgccaagggcagaacagcactgcacatagcggcgtccaatgggtacgaggactgcgtgctggtgctgctcaagcacgcgtgcaacgtgaacatcaaggacgcacagggcaacacggcgatgtggaacgccatcgcggcagggcaccacaagatcttcaatatcctgtaccagttcgcgcacgcatcgaacccgcacgccggcggagacgtcctgtgcctcgccgcgcgccgcggtgacctcgacgcgctccgggagctcctcaagctcggcctggacgtggactcggaggaccacgacggcgccaccgcgctgcgcgtcgcgatggccaacggccacgtcgacgtagccaggttcctgatcatgaacggggccagtgtggacaaggcaaaccttgacgacgacggctccagcgccgcgcggctaacaatgtcgccgaccgagctgcgcgagctgctgcagaagcgggagctcggccactcgataaccatcgttgactcgtcgccggcggtggtcccggacggcggctcgtcggggcatagccgtccgggcagattacagagcacaagctcggacaaccagcgctcgcctcgggtgagcttatacaagggccacccgtccctcagaaaccgcagctctgaagctggcaagctgatcaatcttcgagaagccaccatgggagaattcaaagccatcatcggtgagaaattgaaagttgatgcggagaaggcgctgatcgtgaacgacgaaggagctgagattgactccatcgacgtgatccgggacaacgacaagctgttcgtggtcacccaagaagatctgaggcggctggcaacaatgaacttgtcttcgtcatag

SEQ ID NO: 4181 - DNA, 2880 bp, Hordeum vulgare
cccggaattatcttagctagcacgagtggtacgtaaacagtgtacgtgctccgtctagttagttctccaattagctagctatacgttgcccaagagattgcagcagctcttgttccgggacgggagcaatgaagatccccagcttccagagcaagagcagcagcggcggggccagcggctcgagcacgggcttcggctcaggctccttcaacctccggaacctgtccaagctcatgctgccgccgctcggccacagcctcagccagtcgacttccggcaccgacgagagggtcgtctcgcccctcgactccagatacaggtgctgggagacgttcatggtgatcctggtggcctactcggcatgggtgtacccgttcgaggtggccttcatggaagcctcgcccaagggggggctggaggtggccgacatggtcgtcgacatcttcttcgccgtcgacatcgccctcaccttcttcgtggcctacatcgactcgaggacgcagctcctcgtccgcgacaggaagaggataaccttcaggtatctgtcgacgttcttcatcatggacgtggcgtcgacgattccgtaccaaggcatagcctacctcgtcaacggcgaggtcagggaaggcatggtttacagcctgctcgggctgctccggctctggcgtctcaggaaggtcaagcaattcttcacaaggctggagaaggacatcaggttcagctacttctgggtacgctgcgctcggctcatcgcggtgacgctgttcctggtgcactgcgccgggtgcctgtactacatgctggcggaccggtacccggacagggacaagacgtggatcggcgcggtgatccccaacttccggcaggagagcctgtggatccgctacatctcctccatctactggtccatcaccaccatgaccaccgtcggctacggcgacctgcacgcccagaacaacctcgagatgatcttcaacatcttctacatgctcttcaacctcggcctcaccgcctacctcatcggcaacatgaccaacctcgtcgtggagggcacacgccgcaccatggagttcaggaacagcattcgtgcggcgtccaacttcgtgtgccgcaaccacctgccgccgcggctgcagcagcagatcctggcctacatgtgcctcaagttcagggcggagagcttgaaccagcagcagctcatggaccagctgcccaagtccatctgcaagagcatctgcgagcacctcttcctccccgtggtcaaggacgtgtacctcttcaagggcatctccagagatgcgcagctgctccttgtcaccaagaccaagccggagtacataccgcccaaggaggacgtgatcgtgcagaacgaggcggccgacgacgtgtacatcatcgtgtccggcgaggtggaggtcatatacttcaacggcgagcgggaggaggtggtgggaaagctggggaccttggacatcttcggcgaggtgagtgccctgagcgaccgcccgcagaccttcacgttccggaccaggacgctcagccagctgctgaggctcaagcaggccacgctcagggaggtcatgcagagcaagcccgacgacagcgccctcatcgtcaggaacttcctcaagcatcagattgaggtgcatgacatgaaggacctgctgggcgagagcatcggagcggccggcagtggcaacatcgtcccgtgcaatctgctgacggtcgccgccacagggaacggcggcttccttggggacctgctcaaggtcgggatggaccctgacgtcggtgactccaagggaagaaccgcgctgcacatcgcggcgtcaaaggggtacgacgactgcgtgcaggctctgctcatgcacggctgcaacgtcaacatcaaagacgcgcagggcaacacggcgctgtggcaggccatcgcggcgaggcaccacaaggtgttcagcaacctgtaccacgccgcgcgcgccacgaacccgcgcgccggcggcgacctcctgtgcctcgccgcgcggcgaggcgacctcgacacgctccgcgagctcctcaagcacggcctggacgtggactccgagggccacgacggcgccacggcgttgcgcgtcgcgctgtccgaggggcaggccgacgtggccaggttcctcgtcatgaacggggccagcgtggacaaggccggcctcgacgacgacggctctgccccgcagcagaccacgctgccggcggccgagctgcgtgagctcgtgaagaggcgggaggtcggccacccgatcaccatctacgactacgactcgccgccggcggtctgctcgtcgtccggggagcttcggcaggggaggttcccaatcccgggcagcgcgagatcatcggacagcgcgcactggccgcgggtgagcatctacaagggccatccgttcgtcagaacccacagctccgaggccggaaagctcgtcaatctgcccgccacgatggaggagctcaaaaccgtcattggagagaaactgaaagtggatccggaggaggcgctggtcgtgaaccacgagggagcggagatcgactcggtggacgtgatccgcgacaacgacaagctgttcatcgtcacccaagagcacatgaggatgctagcgtcgatggattccgcggctgctttgccgcatacattgtctgtaggttcaagtgtttcagtagcaagtgtcatataattctgacatgtgctagctggaattattttttctctctcgttctgaataatccagtcatctccgtggcatgtcatataattttgatatgtgctatctccgtggcatggcgaagattcaagcaacgtcacacgagtggtttgtgaaaaaaaaaaaaaaaaaaaaaaaaaaaaaa

SEQ ID NO: 4182 - DNA, 2902 bp, Hordeum vulgare subsp. vulgare
ggacgggagcaatgaagatccccagcttccagagcaagagcagcagcggcggggccagcggctcgagcacgggcttcggctcaggctccttcaacctccggaacctgtccaagctcatgctgccgccgctcggccacagcctcagccagtcgacttccggcaccgacgagagggtcgtctcgcccctcgactccagatacaggtgctgggagacgttcatggtgatcctggtggcctactcggcatgggtgtacccgttcgaggtggccttcatggaagcctcgcccaagggggggctggaggtggccgacatggtcgtcgacatcttcttcgccgtcgacatcgccctcaccttcttcgtggcctacatcgactcgaggacgcagctcctcgtccgcgacaggaagaggataaccttcaggtatctgtcgacgttcttcatcatgggcgtggcgtcgacgattccgtaccaaggcatagcctacctcgtcaacggcgaggtcagggaaggcatggtttacagcctgctcgggctgctccggctctggcgtctcaggaaggtcaagcaattcttcacaaggctggagaaggacatcaggttcagctacttctgggtacgctgcgctcggctcatcgcggtgacgctgttcctggtgcactgcgccgggtgcctgtactacatgctggcggaccggtacccggacagggacaagacgtggatcggcgcggtgatccccaacttccggcaggagagcctgtggatccgctacatctcctccatctactggtccatcaccaccatgaccaccgtcggctacggcgacctgcacgcccagaacaacctcgagatgatcttcaacatcttctacatgctcttcaacctcggcctcaccgcctacctcatcggcaacatgaccaacctcgtcgtggagggcacacgccgcaccatggagttcaggaacagcattcgtgcggcgtccaacttcgtgtgccgcaaccacctgccgccgcggctgcagcagcagatcctggcctacatgtgcctcaagttcagggcggagagcttgaaccagcagcagctcatggaccagctgcccaagtccatctgcaagagcatctgcgagcacctcttcctccccgtggtcaaggacgtgtacctcttcaagggcatctccagagatgcgcagctgctccttgtcaccaagaccaagccggagtacataccgcccaaggaggacgtgatcgtgcagaacgaggcggccgacgacgtgtacatcatcgtgtccggcgaggtggaggtcatatacttcaacggcgagcgggaggaggtggtgggaaagctggggaccttggacatcttcggcgaggtgagtgccctgagcgaccgcccgcagaccttcacgttccggaccaggacgctcagccagctgctgaggctcaagcaggccacgctcagggaggtcatgcagagcaagcccgacgacagcgccctcatcgtcaggaacttcctcaagcatcagattgaggtgcatgacatgaaggacctgctgggcgagagcatcggagcggccggcagtggcaacatcgtcccgtgcaatctgctgacggtcgccgccacagggaacggcggcttccttggggacctgctcaaggtcgggatggaccctgacgtcggtgactccaagggaagaaccgcgctgcacatcgcggcgtcaaaggggtacgacgactgcgtgcaggctctgctcatgcacggctgcaacgtcaacatcaaagacgcgcagggcaacacggcgctgtggcaggccatcgcggcgaggcaccacaaggtgttcagcaacctgtaccacgccgcgcgcgccacgaacccgcgcgccggcggcgacctcctgtgcctcgccgcgcggcgaggcgacctcgacacgctccgcgagctcctcaagcacggcctggacgtggactccgagggccacgacggcgccacggcgttgcgcgtcgcgctgtccgaggggcaggccgacgtggccaggttcctcgtcatgaacggggccagcgtggacaaggccggcctcgacgacgacggctctgccccgcagcagaccacgctgccggcggccgagctgcgtgagctcgtgaagaggcgggaggtcggccacccgatcaccatctacgactacgactcgccgccggcggtctgctcgtcgtccggggagcttcggcaggggaggttcccaatcccgggcagcgcgagatcatcggacagcgcgcactggccgcgggtgagcatctacaagggccatccgttcgtcagaacccacagctccgaggccggaaagctcgtcaatctgcccgccacgatggaggagctcaaaaccgtcattggagagaaactgaaagtggatccggaggaggcgctggtcgtgaaccacgagggagcggagatcgactcggtggacgtgatccgcgacaacgacaagctgttcatcgtcacccaagagcacatgaggatgctagcgtcgatggattccgcggctgctttgccgcatacattgtctgtaggttcaagtgtttcagtagcaagtgtcatataattctgacatgtgctagctggaattattttttctctctcgttctgaataatccagtcatctccgtggcatgtcatataattttgatatgtgctatctccgtggcatggcgaagattcaagcaacgtcacacgagtggtttgtgatggttcctttgtatatggacactggtagattacaggtaatgcctcctcccccgagaaaggatacggcccgtggtgcaaatgcatggatgatatgccattttatcaaagaacgtggatgttgtagacatgatgggacagggatatgggccgtaaattgtcatctcccgt

SEQ ID NO: 4183 - DNA, 2916 bp, Hordeum vulgare subsp. vulgare
gggttctccaattagctagctatacgttgcccaagagattgcagcagctcttgttccgggacgggagcaatgaagatccccagcttccagagcaagagcagcagcggcggggccagcggctcgagcacgggcttcggctcaggctccttcaacctccggaacctgtccaagctcatgctgccgccgctcggccacagcctcagccagtcgacttccggcaccgacgagagggtcgtctcgcccctcgactccagatacaggtgctgggagacgttcatggtgatcctggtggcctactcggcatgggtgtacccgttcgaggtggccttcatggaagcctcgcccaagggggggctggaggtggccgacatggtcgtcgacatcttcttcgccgtcgacatcgccctcaccttcttcgtggcctacatcgactcgaggacgcagctcctcgtccgcgacaggaagaggataaccttcaggtatctgtcgacgttcttcatcatggacgtggcgtcgacgattccgtaccaaggcatagcctacctcgtcaacggcgaggtcagggaaggcatggtttacagcctgctcgggctgctccggctctggcgtctcaggaaggtcaagcaattcttcacaaggctggagaaggacatcaggttcagctacttctgggtacgctgcgctcggctcatcgcggtgacgctgttcctggtgcactgcgccgggtgcctgtactacatgctggcggaccggtacccggacagggacaagacgtggatcggcgcggtgatccccaacttccggcaggagagcctgtggatccgctacatctcctccatctactggtccatcaccaccatgaccaccgtcggctacggcgacctgcacgcccagaacaacctcgagatgatcttcaacatcttctacatgctcttcaacctcggcctcaccgcctacctcatcggcaacatgaccaacctcgtcgtggagggcacacgccgcaccatggagttcaggaacagcattcgtgcggcgtccaacttcgtgtgccgcaaccacctgccgccgcggctgcagcagcagatcctggcctacatgtgcctcaagttcagggcggagagcttgaaccagcagcagctcatggaccagctgcccaagtccatctgcaagagcatctgcgagcacctcttcctccccgtggtcaaggacgtgtacctctccaagggcatctccagagatgcgcagctgctccttgtcaccaagaccaagccggagtacataccgcccaaggaggacgtgatcgtgcagaacgaggcggccgacgacgtgtacatcatcgtgtccggcgaggtggaggtcatatacttcaacggcgagcgggaggaggtggtgggaaagctggggaccttggacatcttcggcgaggtgagtgccctgagcgaccgcccgcagaccttcacgttccggaccaggacgctcagccagctgctgaggctcaagcaggccacgctcagggaggtcatgcagagcaagcccgacgacagcgccctcatcgtcaggaacttcctcaagcatcagattgaggtgcatgacatgaaggacctgctgggcgagagcatcggagcggccggcagtggcaacatcgtcccgtgcaatctgctgacggtcgccgccacagggaacggcggcttccttggggacctgctcaaggtcgggatggaccctgacgtcggtgactccaagggaagaaccgcgctgcacatcgcggcgtcaaaggggtacgacgactgcgtgcaggctctgctcatgcacggctgcaacgtcaacatcaaagacgcgcagggcaacacggcgctgtggcaggccatcgcggcgaggcaccacaaggtgttcagcaacctgtaccacgccgcgcgcgccacgaacccgcgcgccggcggcgacctcctgtgcctcgccgcgcggcgaggcgacctcgacacgctccgcgagctcctcaagcacggcctggacgtggactccgagggccacgacggcgccacggcgttgcgcgtcgcgctgtccgaggggcaggccgacgtggccaggttcctcgtcatgaacggggccagcgtggacaaggccggcctcgacgacgacggctctgccccgcagcagaccacgctgccggcggccgagctgcgtgagctcgtgaagaggcgggaggtcggccacccgatcaccatctacgactacgactcgccgccggcggtctgctcgtcgtccggggagcttcggcaggggaggttcccaatcccgggcagcgcgagatcatcggacagcgcgcactggccgcgggtgagcatctacaagggccatccgttcgtcagaacccacagctccgaggccggaaagctcgtcaatctgcccgccacgatggaggagctcaaaaccgtcattggagagaaactgaaagtggatccggaggaggcgctggtcgtgaaccacgagggagcggagatcgactcggtggacgtgatccgcgacaacgacaagctgttcatcgtcacccaagagcacatgaggatgctagcgtcgatggattccgcggctgctttgccgcatacattgtctgtaggttcaagtgtttcagtagcaagtgtcatataattctgacatgtgctagctggaattattttttctctctcgttctgaataatccagtcatctccgtggcatgtcatataattttgatatgtgctatctccgtggcatggcgaagattcaagcaacgtcacacgagtggtttgtgatggttcctttgtatatggacactggtagattacaggtaatgcctcctcccccgagaaaggatacggcccgtggtgcaaatgcatggatgatatgccattttatcaaagaacgtggatgttgtag

SEQ ID NO: 4184 - DNA, 2065 bp, Oryza sativa Japonica Group; identical to SEQ ID NO: 1577

SEQ ID NO: 4185 - DNA, 1605 bp, Zea mays; identical to SEQ ID NO: 1084

SEQ ID NO: 4186 - DNA, 1638 bp, Sorghum bicolor
atggagatgggcacggttctgggtgccatggaggagtacaccttcaccttcctggccatggccgtggggttcctagtgcttgtgtatctgtacgagccgtactggaaggtgcgccacgtgcccgggcccgtgccgctgccgctcatcggccacctccacctgctggcgaagcacggcccagacgtcttccctgtgctcgccaagaagcacgggcctatcttcagatttcacgtgggaaggcagccattgatcatcgtggccgacgcagagctctgcaaggaggtgggcatcaagaagttcaagagcatgcctaaccggagcttgccttcgcccatcgccaattctcccatacatcggaaaggcctcttcgctacaagggattcgaggtggtcggcgatgcgaaacgttatcgtctcgatctaccagccgtcgcacctcgccgggctgatgccgaccatggagtcgtgcatcgagcgcgctgcgacgacgaacctcggcgatggcgaggaggtcgtcttctccaagctggcgctgagcctcgccaccgacatcatcgggcaagcggcgttcggcacagactttggcctctcgggaaagccggtggtgcctgacgatgacatgaagggtgtcgacgtcgtcgtcggagatgcagcgaaggcgaaggcgtcatcatcggaattcataaacatgcacatccactcgaccacgtcgctcaagatggacctgtcggggtcgctctccaccatcgttggcgcgctcgtgcccttcctgcagaatccgctgcggcaggtgctcttgagggtccccggctccgccgaccgggagatcaaccgtgtgaacggcgagctccgtaggatggtggacggcatcgtcgccgcccgcgcagcggagagggagcgtgcgccggcggcgacagcagcacagcagcacaaggacttcctctccgtggtgctggcggcgagggagagcgacgcgtccacgcgggagctgctctcgccggactacttgagcgcgttgacctacgagcacctcatcgctgggccggcgaccgcggcgttcacgctgtcctccgtggtctacctcgtcgccaagcacccggaagtggaggagaagctgcttagggagatggacgcgttcggccctcgcggcagtgtgcccacggcggatgatcttcagaccaagttcccctacctcgatcaggtggtgaaggagtcgatgaggctgttcatggtgtcgccattggtggcgcgagagacctccgagcgagtggagatcggtggctatgtgcttccaaagggcgcatgggtgtggatggcaccaggggtcctcgccaaggacgcccacaacttcccggacccggagctgttccgaccagagcggttcgacccagccggcgacgagcaaaagaagcgtcacccatacgcgttcatcccttttggaatcggccccagggtttgcatcggccagaagttcgccatccaggagatcaagctcgcgataatccacctctatcagcactatgtgttccggcattctcccagcatggagtcccctctagagtttcagtttgggattgtggtcaacttcaagcatggtgtcaagcttcacgtcatcaagaggcatgtggaaaataattaa

SEQ ID NO: 4187 - DNA, 1617 bp, Oryza sativa Japonica Group
atggagatcatcagcacagtgctgggctcaacggcggagtacgcggtcaccttggtggccatggctgtggggctcctgctgttgggctacttgtacgagccatactggaaagtgcggcacgtgccgggccccgtgcccctgccgttcatcggccacctccacctgctcgccatgcacgggccggacgtgttcaccgtgctcgcaaggaagtacggtcctgtcttcagatttcacatgggaagacaaccattggtcatggtggcggatgccgagctgtgcaaggaagtgggcgtaaagaaattcaagagcattcctaaccgaagcatgccctcagccattgccaattctcttattaatcagaaaggcctgtgcttcacaaggggttcgaggtggacggcgttgcgaaacatgatcatctccatctaccagccgtctcacctggctagcctgatccccaccatgcagtcgtgcattgagtgcgtgtccaagaaccttgatggccaagaggacataacattctccgatctcgctctcggcttcgccaccgatgtcatcggccaggcggcgttcggaacggactttggcctgtcaaaaatatcagcatcttcgaatgacgacgacatcgacaagatcgccactgataccagcgcggaggccaaggcatcatcggagttcatcaggatgcacgtgcacgcgaccacgtctctcaagatggacctgtccggctcactgtccatcatcatcggccaactcctgccattcctccaagagccgttccggcaggtgctcaagaggattccctggacggcggaccacgagatcgaccatgtgaacctcgcgctcgggggacagatggacaaaatcgttgccgagagagcggcggcaatggagcgcgaccaggcagcgccgcatgcgcagcagcgcaaggacttcctgtccgtcgtcctcgcggcgagagagtcgaacaaatcctggcgggagcttcttacgccggactacatcagcgcgctcacttacgagcacctcctcgccgggtcggccacgacggcgttcactctctccacggtgctctacctcgtctccaagcacccggaggtggaggagaagttgctcagggagattgacgggttcggaccacacgaccatgcgccgacggccgaggatttgcagaccaagttcccctaccttgatcaggcatgcatgcccttcttcgacattggtcgtatttatgcaagggaaacgtgcgaacaggttgaaattggaggatatgcccttccaaagggaacatgggtgtggctggcaccaggagtcctagcgaaggatcccaagaacttcccggagccagaggtattccggccggagcggttcgaccccaacggcgaggaggagaagaggaggcacccatacgcgttcattccgtttgggatcgggccaagggcgtgcatcggccagaagttctccatccaggagatcaaactgtcagtgatccatctgtaccgtaactacgtgtttcggcactcgcccagcatggagtcacctctcgagtttcagtactcgatcgtttgcaacttcaagtacggcgtcaagcttcgggtcatcaagaggcacactgcatag

SEQ ID NO: 4188 - DNA, 868 bp, Sorghum bicolor
ccgagcaggaggcggacaaggtaagcagccgcagcagccggaaccctagcgccgccgccgcatccgcagccatgggtatcgacctcgtcgccggtgggaggaacaagaagaccaagcgcaccgcgcccaagtccgacgatgtctacctcaagctcctcgtcaagctctaccgtttcctggttaggaggaccaagagcaacttcaacgctgtcatcctcaagaggctcttcatgagcaaaaccaaccgcccaccaatttccctgcgccgccttgtcaagttcatggaaggaaaggaggagaagaacattgctgtgattgttggcacagtcacagatgacaaaaggatccaggaggttccagcaatgaaggttactgccctgaggttcaccgagacagcaagagccaggattgtcaatgctggtggggagtgcctcacatttgaccagcttgctctccgtgctccacttggcgagaacacggtcctcttgaggggccccaagaatgctcgtgaggcggtgaggcactttggcaaggctcctggcgtgccgcacagccacaccaagccatatgtgcgctccaagggaaggaagttcgaaaaggctcgtggcaggaggaacagccgtggattcaaggtttaaaaaagttgttttgtggtccttgtgcgtgttgccatcagcatagtgcaaccgttctgtttgatcaatcgacagtaattagtaatcactttctaccgagagtagtagcacaatttgttgtcctggtttgaattttgaaagatatttgaaggatttcgtcgccttatctactggttactggttgagcaagaagacaatgatctgttgcacctcttatcagagccttgcatctt

SEQ ID NO: 4189 - DNA, 889 bp, Zea mays
gcctctctccttcccgagcaggaggcggacaaggtaagcagcaatcgcaggaaccctagcgccgccgcacccgcaggaatgggtatcgacctcgtcgccggtgggaggaataagaagaccaagcgcactgcgcccaagtctgacgatgtctacctcaagctcctcgtcaagctctaccgtttcttggtcaggaggaccaagagcaatttcaacgctgtcattctcaagaggcttttcatgagtaaaaccaaccgaccaccaatctccatgcgccgccttgtcaagtttatggaaggaaaggagaagaacattgctgtcattgttggcacagtcacagatgacaaaaggatccaggaggttccagcaatgaaggttactgccctgaggttcacggagacagcaagggccaggattgtcaatgctggtggcgagtgcctcacatttgaccagcttgctcttcgtgctccacttggcgagaacacggtcctcttgaggggccccaagaatgcccgtgaggcagtgaggcactttggcaaggctcctggagtgccgcacagccacaccaagccgtatgtgcgctccaagggaaggaagttcgagaaggctcgtggcaggaggaacagccgtggattcaaggtttaaaacaaattgtggccctccgtgttgccatcagcatagtgcaaccgttgtgtttgatcagtcgacagtaattagtcatcactctgtaccgagattagtagcacaatttgttgtcctggtttgaattttggaagatatttgatgtcgtctccttattatctactcgttactggttgagcacgaagattgttttgtgatactcctacatgatttaagacggttcccgacgttcaaaaaaaaaaaaaaaaaa

SEQ ID NO: 4190 - DNA, 996 bp, Oryza sativa Japonica Group
agccggaggccgacacgaggtaagaagcccagaagccctagcgccgccgcagcagcagcagccatgggtatcgacctcgttgccggcgggaggaacaagaagacgaagcgcaccgcgccgaggtcggacgatgtctacctcaagctcctcgtcaagctgtaccgtttcctggtgaggagaaccaagagtaacttcaatgccgtgatcctcaagaggctcttcatgagcaagaccaaccgcccgccgctctccctgcgccgcctcgccaagttcatggaaggcaaggaggagaacaacattgctgtgattgttggtacagtcactgatgacaagaggatccaagagattccgaaaatgaaggttactgccctgaggttcacggagacggctagggcaaggattgtcaatgctggcggcgagtgcctcaccttcgaccagcttgctctccgtgctccgcttggggagaacacggtcctcttgaggggtcccaagaatgcccgtgaggccgtcaggcactttggtaaggctcctggtgtgccgcacagccacacgaagccatatgtgcgctccaagggaaggaagttcgagaaggcccgtggcaggaggaacagccgtggattcaaggtctaagtcagctcctgtttgcaagtgttgcgatcggcattgtgcgaccgttctgtttgagcaatcgacagtaattagtagtcacttctctactgagactagcaaaacttaattgtgtcatttctgaaagatattttgaaggatcctttctacctacctacatgcgtttgtgggcaagaagacaatgttttttgtttcctctctattagagcttgaaaattttcgcctccattgctctcttggtgatagtgaagtcatgggctcatggcttgctgtcatggtgaaatgatggttcagctcatggctgatgtgcttgattatgtgggtttctgtgatgttattgcataagtcaatgcctgaagccactcaacc

SEQ ID NO: 4191 - DNA, 928 bp, Hordeum vulgare subsp. vulgare
ggggagccggaggcggacgaggtaagaagcagcagccgcagcgcgaccccgcgaggaaaccctaccgccgccgccgcagaagcagccatgggtatcgacctcgtcgctggcgggaggaacaagaggaccaagcgcgtcgcgcccaagtccgacgatgtgtacctcaagctcctcgtcaagctctaccgtttcctggtgaggaggaccaagagcaagttcaacgccgtcatcctcaagaggctcttcatgagcaagaccaaccgcccgccgctctccatgcgccgtctctccaacttcatgaagggaaaggaggagaagaacattgctgtggttgttggcacaatcacagatgacatgcggatccaagagatcccagcaatgaaggttaccgctctgaggttcacagagacagcgagggcaaggattgtcaatgctggtggggagtgcctcacttttgaccagcttgctctccgtgctccaactggggagaacacgatcctgttgaggggacccaagaatgcccgtgaggcggtgaggcacttcggcaaggctcctggtgtgccgcacagccacaccaagccctatgtgcgctccaagggtaggaagtttgagaaggctcgtggtaggaggaacagccgtggcttcaaggtttaagttgccctttctggttagtcgctgtttgcgtggagcggctgttgttctgtttgagcaattgacagtaattagtaaagtacttagtactgagagcagcacaatctatcgccccagtgttcgaatgatattttggaagattcttatggctgtcaactgtttttattttgtgagcttgaagaccatgttttgttgcaccctgtctcttagaattctctgctggcaatgtctactgctgaatgtgttctctctacgtgatggtcagtgtagttggttc

SEQ ID NO: 4192 - DNA, 877 bp, Sorghum bicolor
agaaccctagcgcccgtcccgccgccgccgcagccgccgctgcagcaccaccgctccgtttcacaaccatgggtatcgacctcgtcgccggcggccgcaacaagaagaccaagcgcacggcgcccaagtccgacgatgtctatctcaagctccttgtcaagctctaccgcttccttgtccgtaggacaaagagcaacttcaacgccgtgatcctgaagcgactgttcatgagcaagaccaaccgcccgccgctctcgatgcgccgcctcgttaagttcatggaggggaagagtgatcagattgccgttattgtgggcaccgtgactgacgacaagaggatcaacgaggtgccggcgatgaaggtgtgtgcgctcaggttcactgagacagctagggccaggatcatcaatgccggtggagagtgcctcaccttcgaccagcttgcgctccgtgccccgctcgggcaaaacacggttctcctgaggggtcctaagaacgctagggaagctgttaagcacttcggccctgcaccaggagtgccacacagccacaccaagccttacgttcgctcaaagggaaggaagtttgagaaggcaagaggtaggaggaacagcaggggcttcaaggtctaaggagccgcagccatgcaaatccatgtcattttgctctaatcagctatacattactgttttggggtatcagagttgcaatgttttacatgtcagaatctcaagttattaccagatattggaccaatcaaattttgctcttaattttttgcgccgtgagatttttgtttgtcagcccgtgatgaagatactctcatatcattgttgttggtgccaacagtatgagaaagtctaggtgcctttttgca

SEQ ID NO: 4193 - DNA, 931 bp, Sorghum bicolor
ccctagaacccgcgccgccgccgccgccgccgccgccgccgccggtcctcctcactgctcgccgcgcgttgcaatgggtatcgacctagtcgccggcggccggaacaagaagaccaagcgcaccgcgcccaagtccgacgatgtctacctcaagctcctcgtcaagctgtaccgcttccttgttcggaggaccaagagcaacttcaacgctgtgatcctgaagcggctcttcatgagcaagaccaaccgcccgcctctctcgctccgccgcctcgtcaacttcatggagggcaaggagaatcagattgctgtgatagtgggcaccgtgactgacgacaagagggtctatgaggtaccagcaatgaaggtggctgcgctcaggttcactgagacggccagggcccggattgtgaatgctggtggcgagtgcctcacctttgaccagcttgcgctgcgtgccccgctgggccagaacacggttctgctgaggggacctaagaatgctagggaagctgtgaagcactttggccctgcgcctggtgtgccccacagccacacgaagccatacgtgcgctccaagggcaggaagtttgagaaggcaagaggaaggaggaacagcagaggcttcaaggtctaggttgtcgccatatctatgtattctgacctggttgaccatcttgtttgagtcatagagttggtatatgatattacaccccagttccaggacgtttgagagctctttgttgtttgtacaccagttcaggatctgcaaaaatttgctcgattggtttgcgccctacttgaagttccaagtgacaaaagcacaatagggtgcatctcattggatccattaatgtctgtttggagaacgtcccatgttatccttttgtgttcgagtcgcattcagttatcctacaaagatgaagttgtg

SEQ ID NO: 4194 - DNA, 788 bp, Zea mays
aagaaccctagcgccccgcccgtcctgccgccgccgcagccgccatcgcacggccatgggtatcgatctcgtagccggcggccgcaacaagaagaccaagcgcacggcgcccaagtccgacgatgtctacctcaagctcctcgtcaagctctaccgcttccttgtgcgcaggacaaagagcaacttcaacgccgtgatcctcaagcgcctcttcatgagcaagaccaaccgcccgccgctctcgatgcgccgcctcgtcaggttcatggaggggaagggtgatcagatcgccgtgattgtgggcaccgtgaccgacgacaagaggatcagcgaggtgccggcgatgaaggtctgcgcgctcaggttcactgagacagcgagggccaggatcatcaatgctggcggagagtgcctcaccttcgaccagctcgcgctccgtgccccacttgggcaaaacacggttctgctgaggggtcctaagaacgctagggaagctgtcaggcacttcgggcctgcaccaggagtgcctcacagccacaccaagccttatgttcgctcgaagggtaggaagtttgagaaggcgagaggaaggaggaacagcaggggcttcaaggtctaagtggccactgccttgccaatctagtgccgttttgctcgtgtcagctcaatattaccgttttggtgtcatagttgtaatgttttagttgtcggaatctcgtgtcattatcggatatcgaaccaatcaaatttcgctccttttttgttttgccaaaaaaaaaaaaaaaaaa

SEQ ID NO: 4195 - DNA, 769 bp, Oryza sativa Japonica Group
ctagaagaaatcacctccccctccgccgccgcacgccgccgccatgggtatcgacctcgtcgccggcggccggaacaagaagaccaagcgcacggcgcccaagtccgacgatgtctacctcaagctcatcgtcaagctctaccgcttcctggtgcggaggaccaagagccccttcaacgccgtgatcctgaggcggctcttcatgagcaagaccaaccgcccgccgctctcgctccgccgcctcgtcaggttcatggagggcaaggagaaccagatcgccgtgatcgtgggcaccgttaccgacgacaagagggtctacgaggtgccggcgatgaaggtggccgcgctcaggttcaccgagaccgcgagggctcgcattgtgaatactggtggagagtgccttaccttcgatcagctggcgctccgcgctcctctgggccagaacacggttctcctgaggggtcctaagaacgccagggaagcagtgaagcactttggtcctgctcctggagtgccacacagcaacaccaagccttacgtgcgctcaaagggaaggaagtttgagaaggcgagaggaaggaggaacagcaaaggcttcaaggtctaagttatcgcctgctattcgtgtggttgcactgaatgggctacatagctcttgtttgagtttcagagttcttgtgttgttattactcaagtgccaggatcagctaaattttgttcgaatgttatgcactttgaatcagagaattacaagcgttggcagcacgtt

SEQ ID NO: 4196 - DNA, 849 bp, Oryza sativa Japonica Group
attcgccgccgccgccgccgccggaaaaccatgggtatcgacctcgtcgccggcggccggaacaagaagaccaagcgcacggcgcccaggtccgaggatgtctacctcaagctcatcgtcaagctctaccgcttcctggtgcggaggaccaagagccacttcaacgccgtgatcctgaagcggctcttcatgagcaagaccaaccgcccgccgctctcgatgcgccgtctcgtcaggttcatggaggggaaggtacctgatcgccatgccatttcgggggaccagatcgccgtgatcgtgggcaccgtcacagatgacaagaggatctatgaggtgccggcgatgaaggtggctgctctcaggttcaccgagaccgcgagagcacggatcatcaatgccggtggcgagtgcctcacgttcgaccagctcgctctccgcgccccgcttggccagaacacggtcctcctgaggggtcccaagaacgctagggaagctgttaagcactttggccctgctccaggagttccccacagcaacactaagccatatgttcgctcaaagggaaggaaatttgagaaggcaagaggaagaaggaacagcaagggcttcaaggtataagttgtggcagctttggcaccattacaccaaactgctcatatcagttagacatcactgttttggatgccagacttgcactgttgttttggatgctagacttacactgttttagatgtcaaaatattgtgttactgacttcacaggaacaattaaattgtttacctcctttgcacttcaagatatttgtttggcgtctcgcattatgaatataatctcctttatttatgaggc

SEQ ID NO: 4197 - DNA, 2334 bp, Sorghum bicolor
ttgctcccttccccccctcgcttcccccgaatttgatgcttaaaccctcgccgggaggagcaggaggactccaatcccgacgccccgcgccaccacctaccgctgcgcccggatctccgacgccatggccgccgcgccgcaccagaccggccccgccgcagatagcatgattccgctgcagtcggaacctgtacttgagaataacccctccaagagtgcaaacgccaaggaccagattctttctggtgcagagaatgtgtctgcaggcaatgcacgtggcgctagctccttgaaatcgccaaaaggcccgccagagaagcctagctctgtcggaaaagctggagaacagccttttgtctaccagcaaaatgtgtatgcaccgcagccacaaccactctatcctggaggatacatgaatccttcaggacagtgggaggaatatccccattatgtgaatatggaggggctccattccgtatctcccggaatctacaatgacaaccagtccctcatgctatctcctggatatgcaagcaacccccaaatgatgtatggagcatattctcctgtttccaccgttggagatggccaacaatacttccctgtgcactatcccttctcaagtccttactatcaaccaccagcttctcctagcatgggatattcaagctctgcgactggaatatcccaaggagaccctatgctgcagcaagagtactttcttcctgatggccttctatattcacccacaccagggtatcatcatccattcagctcattcgacagagcaccgacacaaccaaataatgctcctgggctgtttggtcaagggaatctaccactggcttctggcatgcatcatggatcgatgtatggtcctggatcctacaagggacgccagcaaggtagcaaatttggtggcactactccaagttggagttctgctggccgcagatttggtacttttgacttgagtggcaatcaacaaaggggaagcatgccatttggtagtcacaatggctctctggagtttatgaatgagcaaaaccgtgggccacgcgctacaaaaccgaagacacaagacactgagaactcctcagatgagaaaaacgagaaaactgttcctctgattgacagtgaactgtacaatcgctctgattttatcactgagtacaaggatgccaaattctttgtaataaagtcctacaccgaggaccatgtacataggagcattaagtataatgtttgggccagcacagccagcgggaacaggaagctggattctgcttaccgtgcggccaaagagaaagaagagcattgccctattttcttgtttttctcggtcaatggaagtggccaattctgtggcgtggctgagatgattggacctgtcgatttcgacagaagtgttgattactggcagcaggataagtggagtggccaattccctgtgaagtggcacataattaaggatgtgccaaacaaccttctgaggcacatcattcttgagaacaatgacaataaacctgtcacaaatagcagggacacccaggaggtgaagctggaacagggcctccagatgcttacaatcttcaagagccatgaggctgagacaacaatcctggaagatttcgacttctatgagcaacgggagaaagccttgcaggagaacagacgtcaacagcagcctgccagcaccgaccctcagaagctggtggataccaaggctcaaggtcctgtggccgatatatcggatgcatttgctaaggccgttcagttgaaggatattgagaacagtgggacaaccccgaaagctgagggcgcatcagctgaaaacggatccgctgccacagccaaggttgaaggaagtgcagacctgaacatgggccctgcggaggaaagcagttgatttgtttcccttctgtctgcaaatttggagcagcagatgaatagcatgctgcaatgtgaaggtcggaaaggggaaagtgcaggttgattgtgttaaatatggtcgtgcccgcgtcagttgtacaacatcataggctttgtttttatctccatttaggttatataatttcaatatcatagttccaaaattattgttcccagttctctttgttcctgttttattttacttccgtcttccatgttcctcgtgtcgtgtcgcaccatgaatgatggttcaattttagtgggtttaggcataagaagctgcagaactatgctgcggtaaagttgcattttctgcagctgaatgtgatactgtcgagtctccatccttgtgtaatttcagagatcctttctctagtgtatcttcgtcttgttactctcagc

SEQ ID NO: 4198 - DNA, 2134 bp, Zea mays
cactcctctcgtcgcgtccaataaaaaggggggaagagcattttcccttttttttgctcccctcccccctcgcttctcccgaatttgatgcttaaaccctcgccgggaggaggactccacgcgcgagcccgcccgcgccacctaccgccgcgcccggatccccgccatggccgccgcgccgcaccgggcccaggtccccgctgatagcacggctccgttgcagacggggcctgtacttgagaataacccctccaagagtgcaaacgccaaggaccagattctttctggtacagagaatgtgactacaggcaatgcacgtggcgctagctccttgagatcgccaaacggcccaccagagaaggctagctctgtcggaaaagctggagagcaaccttatctctaccagcaaaatgtgtatgcaccacagccacaaccactctatcctggaggatacatgaacccttcaggacaatgggaggaatatccccattatgtgaatatggaggggctccattccgtatctcccggaatctacaatgacaaccagtccctcatgctatctgctggatatgcaaacaacccccaaatgatgtatggagcatattctcctgtttccactgctggagatggccaacaatacttccctgtgcactattccttctcaaatccttactatcaaccaccagcttctcctagcatgggatattcaaactccgcaactggaatgtcccaaggagaccctatgctgcagcaagagtatttccttcctgatggccttctatattcacccacaccagggtatcatcaaccattcagctcatttgacagagcactgacacagccaaataatgctcctgggttgtttggtcaagggagtctaccactggcttctggaatgcatcatggatcgatgtatggtcctggatcctacaagggacgccagtatggtagcaaatttggtggcactactccaagttggagttctgctggccgcagatttggtactttcgacttgagtggcaatcaacaaagggggagcatgtcatttggtagtcataatggctctctggagtttatgaatgagcaaaaccgtgggccacgtgctacaaaaccaaagatacaagacacagagaactcaggagatgagaaaagcgagaaaactgttcctctaattgatagtgaactgtacaatcgctctgattttatcactgagtacaaggatgccaaattctttgtaataaagtcctacaccgaggaccatgtacataggagcattaaatataatgtttgggctagcacagccagcggaaacaggaagctggattctgcttaccgtgcggccagagagaaagaagagcattgccctattttcttgtttttctcggttaatggaagtggccaattctgtggcgtggctgagatgattggacctgtcgattttgacagaagtgttaattactggcagcaggataagtggagtggccagttcccagtgaagtggcacataattaaggatgtaccgaacaaccttctgcggcacatcattcttgagaacaatgacaataagcctgtcacaaatagcagggacacccaggaggtgaagctggaacagggcctccagatgctaacgatcttcaagagccatgaggctgagacaacaattgtggaagatttcgacttctatgagcagcgggagaaagccttgcaggagaacagacgtcaacagcatgctgccagcaccgatacccagaaactggtggataccaaggctcaagatgctgtggccgacatatcagatgcatttgccaaggccgtccagttgaagaatactgagaacagtgggacaacccccaaaactgagggtgcttcagctgaaaagggttccgctgccacagccaaggttgaaggaagtgcaaacctgaacacaggccctgtggaggaaagcagttgattcgtttcccttctatctgcaaatttggagcagcagatgaatagcatggtgcgatgtgaaggtcagaaaggggaaggtgtgttgaatatggtcgtgcccccgtcagttgtacaacatcataggctttcttttatggccatttaggttataaaatttcaatatcatagttccaaaattgttgtt

SEQ ID NO: 4199 - DNA, 2131 bp, Zea mays
gtcacgtgcaaaggggggaaaacttctttctctctcttttttttccctcccccgcccgaatctgatgcttaaaccctcgccgggaggaggattccaatcccgacgcaccagcccgcgcccgccacctacagccgcgcccggatctccgccatggccgccgcgccgcaccaggcccagggccccgcagatagtgtgattccgctgcagtctgaacctgcacttgataataatccctccaagagtgcaaacgctagggaccagattctttctggtacggagaatgtgactacaggcaatgcacgcggcggcagctccttgaaatcgcaaaaaggcccgccagagaaggctagctctgtcggaaaacctggagaacaaccttttccctaccatcaaaatgtgtatgcaccacagccacaaccactctatcctggaggctacatgaacccttcaggacaatgggaggaatatccccattatgtgagtatggaggggctccattccgtatctcccggaatctacaatgacaaccagtccctcatgctatctcctggatatgcaaacaatccccaaatgatgtatggagcatattctcctgtttccaccgttggggatggccaacaatacctccctatgcattttcccttctcaagtccttactatcaaccaccagcttctcctagcatgggatattcaagctctgcgactggaatatcccaaggagaccctatgctgcagcaagagtacttccttcctgatggtcttctatattcacccacacaagggtatcatcaaccattcagctcattcgacagagcaccaacacaactaaataatgctcctgggttgtttggtcaagggaatctaccactggcttctggaatgcaccatggatcgatgtatggtcctggatcctacaagggacgccagcaaggtagcaaatttggtggcagtactacaagttggagttctgctggccgcagatttggtactatcgacttgagtggcaatcaacaaaggggcagcatgccatttggtagtcacaatggctctctggagttcatgaatgagcaaaaccgtggaccacgcgctacaaaaccgaagatacaaggcacagagaacacctcaggagatgagagaagcgagaaaattgttcctctgattgatagcgaactgtacaatcgctctgattttataactgagtacaaggatgccaaattctttgtaataaagtcctacaccgaggaccatgtacataggagcattaagtataaagtttgggccagcacagccagcgggaacaggaagctggattctgcttaccatgcagccaaagagaaagaagagcattgccctattttcttgtttttctcagttaatgggagtggccaattctgtggcgtggctgagatgattggacctgtcgatttcgacagaagtgttgattactggcagcaggataagtggagtggccagttccctgtgaagtggcacataattaaagatgtaccgaacaaccttctgcggcacatcattcttgagaacaatgacagtaaacctgtcacaaatagcagggacacacaggaggtgaagctggaacagggcctccagatgctaacaatcttcaagaaccatgaggctgagacaacgatcgtggaagatttcgacttctatgagcagcgggagaaagccttgcaggagaacagacgtcaacagcagcctcccaccacctatcctcagaagctggtggataccaacgctcaaggtcctgtggccgatatatcagatgcatttgccaaggccgtccagttgaaggatactgcgaacagcgggacgaccccgaaagctgagggtgcctcagctgaaaatggatccgctgccacagccaaggttgaagggagtgcaaacctgaacacaggccctgtggagtagagtccgtttcccttctttctgctaatttggagcagcagatgaattgcatgctgcaatgtgaatgccggaaaagtggaaagtgcaggttgatcgtgttaaatatggtcgtggctgcgtcagttgtacaacatcataggctttgttttatctccatttatgttatataagttcaatatcatagttccaaaaaaaaaaaaaaaac

SEQ ID NO: 4200 - DNA, 2382 bp, Oryza sativa Japonica Group
agtcttcccgttcccctcggcgtcgactcccccccaaactccgtctcctcgcgcgagttcgcccgccgcctgcgccgatctccatccggcgaggcgccgccgtccgcccggctgcttccgccgattgcatgattccaccacaatcagaaattgtaggtgagaacaacgcatccaagagtgctgctaaagagcagattctttctagtacaaatgagaaaatgactactagtgttccccagggtgctagctcctcaaaatcaccaaagggtgcacaggagaaggctagttttttgggtaaaggtggagaacaacctttctaccaacccaatgtgtacgcacctcagccacaaacaatctattctggaggatacctgaaccatttgggccaatgggaagaatacccccattatgtcaatatggaaggactccattctgtatcacctggaatttacaacgacaaccagtcaatcatgttatctcctggatatgcaaacaaccctcaaatgatgtatggagcttattctcctggcgttggagatggccagccatacctcccattgcactttcccttctcaagtccttactaccagccaccagcctctcctagcatgggatactctaattccgccactggaatgtctcaaggagatcctatgctgcagcaggagtacttccttcctgacggccttctctactcgccaacaccaggttatcatcaaccattcgggtcttttgacagagcatccacccaaccaagcagcactcctggtttgtttggtcaagggaacacaccgctggcttttggaatgcatcatgggtcaatgtatgcccctggatcctataagccacgccaacaaggtggtaagtttggaggcactactccaagttggagttctggtcgcagatttggtacttttgacttaagcgccaatcaacagaaagggagcatgccatttggtattcagaatggtgctcttgagttcctgaatgagcaaaaccgtgggccacgtgctacaaaaccaaagaaacaagacacagagaactcttcaatagatgacaaaaatgagaaaaatgttcctctggttgatagtgaactgtataatcgccctgattttgtcactgaatacaaggatgcaaaattttttgtaataaagtcctacactgaggaccatgtacataggagcattaagtacaatgtttgggccagtacagctagtgggaatagaaagctggattctgcttatcgcttggccaaagaaaaagaagactattgccctatttttctatttttctcggttaatggcagtggtcagttctgtggtgtagctgagatgattggacccgtcgattttgacaaaagtgtcgattattggcagcaggacaagtggagtggccagttccctgtgaagtggcacattattaaggatgtcccgaacaacctgctgcggcacatcattcttgagaacaatgacaacaaacctgtaactaatagcagggacacccaggaggtgaagctggaacatggtctgcagatgttaactatcttcaagaaccatgaatcggagacgaacattcttgaagactttgacttctatgagcagcgggagaaagccttgcaggagaatagacgtcagcagcagcctgccagcccagagctgcagaaaccagcagagaataaggccctaggagaacttatggcccacatctcagacacatttggtcagactgtccagctaaaagaaactgagaatggcgaaagcaagcctgcagttgagggtgtttcttcagctgatgaagcgtccaccgcaaccaccaaggctgaagatggaacggcgagcacgaacgctagccctgtggagtaaagcagtcgattttctcccccatatcatttactaatttggagcagcagttggatcatatgatgctcttatggaggtgagaagggttaaaagagcaggttggttatgtcaggtgttgctgctgcttcagttgtacaacattataggctttgtttcacctccctttaggttataattccaatttcatagttccgaaattcttgctgtcaatcttctttcctgtctcaatgtgttccctttcgcttttacttgtgttgcgtcatgaatgctgttcaatgtgagtggtggtgtttagccataagaagctgcataattatgctgccggtagctttccagtctcatgtctctctggttccatcctttgtatatttgcagagcgccattcttttcttgtgaacttggagcttcttaagctctcatgtagcacaattctgtagcaaagctcctttggtcacgcggtacttcatgactgaaatattcaacttgtgatacaaggggaacctaattgggaagcattcagaac

SEQ ID NO: 4201 - DNA, 1466 bp, Zea mays; identical to SEQ ID NO: 1085

SEQ ID NO: 4202 - DNA, 1401 bp, Zea mays
ccgatccgtccccgatcatcgcaccacctgtagcccacctcgctctcgagtctcgacccagcgacgagatggccgcggtggatctgaccccaaggacgcccaagaaggcctacggcggcgacggcggcgcctactacgagtggagccccgccgacctgcccatgctcgccgtcgcctccatcggcgccgccaagctctcgctcgccgccggcggcctctccctccccagctactccgactccgccaaggtcgcctacgtcctacaaggcgtcggtacctgcggcctcgtcctccccgaggcgacgaaggagaaggtggtggcggtgaaggagggcgacgcgctggcgctgcccttcggcgcggtgacgtggtggcacaacggccccgccgcgcaggccgacctcacggtgctcttcctcggcgacacctccaagggccacaagcgggggcagttcaccaacttccagctcacggggtccgcgggcatcttcacgggcctgtccaccgagttcgtgtcgcgcgcgtgggatctgccggagcccgacgccgcgaggctggtgtcgagccagccggcctcgggcatcgtcaagctgcccgcctccgccgccgcgctcccggcgccctcgccgcaggaccgcgccggggtggcgctcaactgcctggaggcgccgctggacgtggacatccccggcgggggccgcgtcgtggtgctcaacacggccaacctgccgctggtgcgcgaggtcgggctcggcgccgacctggtccgcatcgacgcccactccatgtgctccccgggcttctcgtgcgactcggcgtaccaggtcacgtacatcgtgcgcggcagcggccgggtgcaggtggtcgggcccgacgggaggcgcgtgctggagacccgcatcgagggcgggtccctcttcatcgtgccccgcttccatgtcgtgtccaagatcgccgacgcgtccgggatggagtggttctccatcatcaccaccccgaacccggtgttcagccacctggcggggaagacgtcggtgtggaaggccatctcgccggaggtgctgcaggcgtccttcaacaccactccggagatggagaagctgttccgctccaagaggctcgactcggagatctttttcgcgcctcccagctccaactgaagcaccagctctccaagacgggggagaggagatcgttctcgattgtcgtcaaggtcatggttattaataattaagttagtgtcgtcgtcttaagttagcgtcgcgtcgtcgtcttaagttagcgtcgtcgaagtcagggtagagcgagaggtagaggtcgtctgtcatccgccattgaactggaactgctttttcaagatgaatactacccctctttcttaaaaaaaaaaaaaaaaaaaaa

SEQ ID NO: 4203 - DNA, 1436 bp, Zea mays
aacaaacacctccgatccgtccccgatcatcgcaccacctgtagcccacctcgctctcgagtctcgacccagcgacgagatggccgcggtggatctgaccccaaggacgcccaagaaggcctacggcggcgacggcggcgcctactacgagtggagccccgccgacctgcccatgctctccgtcgcctccatcggcgccgccaagctctcgctcgccgccggcggcctctccctccccagctactccgactccgccaaggtcgcctacgtcctacaaggcgcgggcacctgcggcctcgtcctgcccgaggcgacgaaggagaaggtggtggcggtgaaggagggcgacgcgctggcgctgcccttcggcgcggtgacgtggtggcacaacggccccgccgcgcaggccgacctcacggtgctcttcctcggcgacacctccaagggccacaagcgggggcagttcaccaacttccagctcacggggtccgcgggcatcttcacgggcctgtccaccgagttcgtgtcgcgcgcgtgggatctgccggagcccgacgccgcgaggctggtgtcgagccagccggcctcgggcatcgtcaagctgcccgcctccgccgccgcgctcccggcgccttcgccgcaggaccgcgccggggtggcgctcaactgcctggaggcgccgctggacgtggacatccccggcgggggccgcgtcgtggtgctcaacacggccaacctgccgctggtgcgcgaggtcgggctcggcgccgacctggtccgcatcgacgcccactccatgtgctccccgggcttctcgtgcgactcggcgtaccaggtcacgtacatcgtgcgcggaagcggccgggtgcaggtggtggggcccgacgggaggcgcgtgctggagacccgcatcgagggcgggtccctcttcatcgtgccccgcttccacgtcgtgtccaagatcgccgacgcgtccgggatggagtggttctccatcatcaccaccccgaaccctgtgttcagccacctggcggggaagacgtcggtgtggaaggccatctcgccggaggtgctgcaggcgtccttcaacaccactccggagatggagaagctcttccgctccaagaggctcgactcggagatcttcttcgcgcctcccagctccaactgaagcaccagctctccaagacgggggagaggatcgttctcgatcgtcgtcaaggtcatggttattaataagggtctattaataattaagttagcgtcgtcgtcttaagttagcgtcgtcgtcttaagttagcgtcgtcgtcttttagcgtcgtcgaagtcagggtagagcgagatgtagagaggtcgtctgtcatccgccattgaactggaactgctttttcaagatgaatactacccctctttcttaaacaaaaaaaaaaaaaaaa

SEQ ID NO: 4204 - DNA, 1528 bp, Sorghum bicolor
acaaacaccaaagcctccgactccgatccccgatcaccaccaccacttccgaattccgatcctcgaacccacttgcagcgatggcggcggtggatctgaccccgaagcagcccaggaaggcgtacggcggagagggcggttcctactacgagtggagccccgccgacctgcccatgctcggcgtcgcctccatcggcgccgctaagctctcgctcgccgccggtggcctcgcgctccccagctactccgactccgccaaggtcgcctacgtcctccaaggcactggcacctgcgggatcgtcttgccggaggcgaccaaggagaaggtggtggccgtgaaggaaggcgacgcgctggctctccccttcggcgtcctgacatggtggcacaacgcccccaccgcgtcgaccgacctgacggtcctcttcctcggcgacacctccaagggccacaagccaggccagttcaccaacttccagctcacgggctccaccggcatcttcactggcctgaccaccgagttcgtctcccgcgcgtgggaccttcccgaagccgacgccgcgaagctggtgtcaagccagcccgcctctggcatcgtcaagacctccatcgcgctgccgacgggctcgcccaaggaccgcgagggcatggcgctcaactgccttgaggcgccgctggacgtggacatccccggcggaggccgcgtggtggtgctcaacaccgtgaacctgccccttgtcaaggacgtcgggctcggcgccgacctcgtccgcatcgacgcgcactccatgtgctcgccggggttctcgtgcgactcggcgtaccaggtgacgtacatcgtccgcggcagcgggagggtccaggtggtcgggcccgacggcaagcgcgtcctggagacccgcgctgaaggtggggtgctcttcatcgtgccgaggttccatgtcgtgtccaagattgctgatgcgtctggcatggagtggttctccatcatcaccacccccaacccgatcttcagccacctggcggggaagacgtcggtgtggaaggcggtgtcggcggaggtgctgcaggcgtcgttcaacaccacgccggagatggagcagctgttccggtccaagaggctcgactcggagatcttcttcgcgcctcccagctccaactgaagcagaaacagcagccggaagccggacgcccactcccctacggggaggagagtcaatctcggtgtcgtcgtcgtcgtcaggtcgtggttagcttggtttaataaagagagtggtggtggtcgtcgtcggcttgctgcctgcatgcttgcttcttgagtcgtcgttcagtgcgtcggtcggtagtcttagcgtcgtcaagtcagtcagggtattagagaagaagaggtcccgtcattgaacatttgagatgtgcttcggagatgaataccatctctcatgcacgcttttgttaattaattattatcattgtggcggttaattatcggctctctctattttgtcttctgtttatttgttgctattat

SEQ ID NO: 4205 - DNA, 1520 bp, Zea mays
atcacgaatcaccaacaccctctcctccaccttccatcccgatcaccgccgccaccgctttcgttccacgtcccgatggcaccggtagatctaacccccaggcagccccggaaggcgtatggcggcgacgccggcgcctactacgagtggagcccagccgacctgcccatgctcggcgtcgcctccatcggcgcagccaagctctccctcgccgccggtgggctctcgctccccagctactccgactcttccaaggtcgcgtacgttcttgaaggcactggcacctgcggcatcgtcctgccggaggcgaccaaggagaaggtgctggccgtgaaggagggcgacgccctcgcgctccccttcggcgtggtcacgtggtggcacaacggccccgccgcgccgacccagctcacggtcctcttcctcggcgacacctccaagggccacaggccggggcagttcaccaacttccagctgacgggcgcgagcggcatcttcacgggcttctccaccgagttcgtgtcgcgcgcgtgggacctgccggaggcgaacgccgcggcgctggtgtcgagccagccggcgtcgggcatcgtcagggcctcgtccccgctgccggcgccctcggcgcaggaccgcgagggggtggcgctcaactgcctggaggcgccgctggacgtggacatcccgggcgggggccgcgtggtggtgctcaacacggcgaacctgcccctggtcagggaggtcgggctgggcgccgacctggtccgcatcgacgcgcactccatgtgctccccgggcttctcgtgcgactcggcgtaccaggtcacctacatcgtgcgcggcagcgggcgcgtgcaggtggtcgggcccgacggggtgcgcgtcctggagacgcgcgtcgagggcggcttcctcttcatcgtgccccgcttccacgtggtgtccaagatcgcggacgcgtcgggcatggaatggttctccatcatcaccacccccaacccgatcttcagccatctggccggaaagacgtcggtgtggaaagccatctcggcggaggtgctgcaggcgtcgttcaacaccacgccggagatggagaagctgttccggtccaagaggcttgactcggagatcttcttcgcgcccccgtccaactgagcaaataggcggaagcccacggtggagtgctctcgtgaagtcgtcgtggttagattagcattagcttagctcgccttaataaagagagaatggtggtggtcctcggctcactgcttcttcagtagcttcagtcgttcagtggttcagtcgttgcgtcggtcggttgtcgtgtccgttcgtcgaactgccaagttttgttaattattattattgtcaccctctgttttgtctaggtctagggctggaaaaaaactttaagccgcggcttgttcaggctcgcgagctatattgttttaattaatctataaaataataataaatattataattctatagataaaaaaaaaaaaaaaaaacggcacgag

SEQ ID NO: 4206 - DNA, 1357 bp, Zea mays
cttcacctccgatcccgccaccactacccaccctttcctttgacgtcccgatggcacctgtagatctaacccccaagcagcccaggaaggcctacggcggcgacggcggcgcctactacgagtggagccccgccgacctgcccatgctcggcgtcgcctccatcggcgcagccaagctctcgctcgccgccggcgggctcgcgctccccagctactccgactcagccaaggtcgcctacgtcctccaaggcacgggcacctgcggcatcgtcctcccagaggcgacgaaggagaaggtggtggccgtgaaggagggcgacgcgctggcgctgcccttcggcgtggtgacgtggtggcacaacggccccgccgcgccgaccccgctcacggtgctcttcctcggcgacacctccaagggccacaggccggggcaattcaccaacttccagctgacgggcgcgaccggcatcttcacgggcttctccaccgagttcgtgtcgcgcgcgtgggaccttccggaggcggacgcggcggcgctggtgtcgagccagccggcctcgggcatcgtccgggcgtcctcgtccccgctgccggcgccgtcgccgcgggaccgcgagggggtggcgctcaactgcctggaggcgccgctggacgtggacatcccgggcgggggccgcgtcgtggtgctcaacacggccaacctgccgctggtcaaggaggtcgggctgggcgccgacctggtccgcatcgacgcccactccatgtgctccccgggcttctcgtgcgactcggcgtaccaggtcacctacatcgtccgcggcagcggccgcgtccaggtggtcgggcccgacggggtgcgcgtcctggagacgcgcgtcgagggcggcttcctcttcatcgtgccccgcttccacgtcgtctccaagatcgccgacgcgtccggcatggagtggttctccatcatcaccacccccaacccgatcttcagccacctggccgggaagacgtcggtgtggaaggccatctcggcggaggtgctgcaggcgtcgttcaacaccacgccggagatggagaagctgttccggtccaagaggctcgactcggagatcttcttcgctcccccatccaactgagaaaataggccggaagccccacggtggagtcctctcgttaggtcgtcgtgcttagattaggttagctagcttgcctttaataaaaagagagtggtggtcgtcggcgtcggcttcggcggtctgcttcttcttcattcagtgcgtcggtcggtttagagtctgtcacgtgtcccgtcattgaactgcagtttttgttaataaagtattgttattattaggtaaaa

SEQ ID NO: 4207 - DNA, 1394 bp, Zea mays
aaaacacccacttcacctccgaccacttcacctccgatcccgccaccactacccaccctttcctttgacgtcccgatggcacctgtagatctaacccccaaacagcccaggaaggcctacggcggcgacggcggcgcctactacgagtggagccccgccgacctgcccatgctcagcgtcgcctccatcggcgcagccaagctctcgctcgccgccggcggtctcgcgctccccagctactctgactcagccaaggtcgcctacgtcctccaaggcacgggcacctgcggcatcgtcctcccagaggcgacgaaggagaaggtggtggccgtgaaggagggcgacgcgctggcgctgcccttcggcgtggtgacgtggtggcacaacggacccgccgcgccgaccccgctcacggtgctcttcctcggcgacacctccaagggccacaggccggggcagttcaccaacttccagctgacgggcgcgaccggcatcttcacgggcttctccaccgagttcgtgtcgcgcgcgtgggacctgccggaggcggacgcggcggcgctggtgtcgagccagccggcgtcggggatcgtccgggcgtcctcgtccccgctgccggcgccgtcgccgcgggaccgcgagggggtggcgatcaactgcctggaggcgccgctggacgtggacatcccgggcgggggccgcgtcgtggtgctcaacacggccaacctgccgctggtcaaggaggtcgggctgggcgccgacctggtccgcatcgacgcccactccatgtgctccccgggcttctcgtgcgactcggcgtaccaggtcacctacatcgtccgcggaagcggccgcgtccaggtggtcgggcccgacggggtgcgcgtcctggagacgcgggtcgagggcggcttcctcttcatcgtgccccgcttccacgtcgtctccaagatcgccgacgcgtccggcatggagtggttctccatcatcaccacccccaacccgatcttcagccacctggccgggaagacgtcggtgtggaaggccatctcggcggaggtgctgcaggcgtcgttcaacaccacgccggagatggagaagctgttccggtccaagaggctcgactcggagatcttcttcgctcccccatccaactgagaaaataggccggaagccccacggtggagtcctctcgttaggtcgtcgtgcttagattaggttagctagcttgcctttaataaaaagagagtggtggtcgtcggcgtcggcttcggcggtctgcttcttcattcagtgcgtcggtcggtttagagtctgtcacgtgtcccgtcattgaactgcaatttttgttaataaagtattgttattattaggtatcaaaaaaaaaaaaaaaa

SEQ ID NO: 4208 - DNA, 1442 bp, Hordeum vulgare subsp. vulgare
ggatcccacacaccctccttcctgctcgccacggcaaccagttccccttccagcccttgagccaaccagccaccctctttgatcgatcgttcggcggcgatggcggtggatctgaccccgaggcagccggcaaaggcgtacggcggcgagggcggcgcctactacgagtggagcccggccgagctgcccatgctcggcgtcgcctccatcggcgccgccaagctctcgctcgccgccggcggcatgtcgctccccagctactccgactccgccaaggtcgcctacgtcctccaaggcaagggaacctgcggcattgtgctgcctgaggccaccaaggagaaggtggtcgccgtgaaggagggtgacgctctggcgctcccctttggggtggtcacctggtggcacaacacccccgagtctgccactgagctcgtcgtcctcttcctcggcgacacctccaagggccacaggcctggccagttcaccaacttccagctcaccggtgccagcggtatcttcaccggcttctccaccgagtttgtcggccgtgcctgggacctcaaggaggacgacgctgccaagctcgtctccagccagccagcctctggcattgttaagctctctgccgggcagaagctgccggagccggttgatgctgaccgcaaggacatggccctcaactgccttgaggccaagcttgacgtggacatccccaacggtggccgcgtggtggtgctcaacacggtgaacctgcccctggtgaaggaggttggactcggtgctgaccttgtcaggatcgacgcccactccatgtgctccccgggcttctcctgtgactcagcgtaccaggtgacctacatcgtccgtggcagcggccgtgttcaggtcgttggccctgacggcaaacgcgtgctggagacccgcattgagggcggcagcctcttcattgtgccccgcttccacgtcgtgtccaagatcgctgatgcctctggcatggagtggttctctatcatcaccacccccaacccgatcttcagccaccttgctgggaagacctctgtgtggaaggccatctcgccggaggtgctggaggcgtcgttcaacaccacgccggagatggagaagctcttccggtctaagaggctggactccgagattttcttcgcccccaactaggagccattcgtcgcgcatcggccggtcgccttaggcaggaataaataaattttagttaggagattgaaactctatgggcgtgattgagtctgtcggttgagctgctggtggttttaattgatcacctctgcgaatctatcttagtttctcctggcagaacagaatgttgctgtcgggtcgtcgttggttaaatcgagtgtgagtgtttgttgccggccgatctgggctcagaactgatgaatgcaatcgatcgttaaattctggtg

SEQ ID NO: 4209 - DNA, 1505 bp, Oryza sativa Japonica Group
aagggaggaaagcagttaagctcaggataaaccgcctcctaatttgagataaatccgttaatccgactcattaatccacggataatcactgcggcatcgtaggccttttttgagctataaatagagctcctgatcccctcctccactccacaccaaaacctctccaatccccaaatcctcctcatctcctcttccagaacctttctttttcgatttcgtgttcgagttctttgtgattgcagcgatggcgtccgtggatctgaccccgaggcaggcgaggaaggcgtacggcggcgatggtgggacctactacgagtggagccccgcagacctgcccatgctggaactcgccaacatcggcggcgccaagctgtcgctcaacgccggtggcctcgccctgcccagcttttccgactccggaaaggttgcgtatgttcttcaaggcaagggcacttgtggcattgtcctgccggaggcgagcaaggagaaggtgatcgccgtgaaggagggagactccctggcactcccctttggcgtggtgacatggtggcataacctcccggagtccccaatcgagctcgtcatcctcttcctcggcgacacatcgaaggcgcacaaggccggccaattcacaaacatgcagctcaccggtgccaccggcatcttcaccggcttctccacggagttcgtcggccgcgcatgggacctcgccgagtccgacgccgtcaagctcgtgtccagccagcctgcctccggcatcgtcaagatcaagtccggccagaagctccccgagccgtcggccgccgaccgcgagggcatggcgctcaactgcctggaggcgccgctcgacgtggacatcaagaacggcggccgcgtggtggtgctcaacacggcgaacctgccgatggtgaaggaggtcgggctcggcgccgacctggtgaggatcgacggccactccatgtgctcgccggggttctcgtgcgactcggcgtaccaggtcacctacttcatccgcggcagcggccgcgtccaggtggtcggcgccgacgggaagcgcgtgctggacacccacgtcgagggcggcaacctgttcatcgtgccgcgcttctgcgtcgtctccaagatcgccgacgcctccggcctgcagtggttctccattatcaccacaccaaacccgatcttcagtcacctggcggggaagacgtcggtgtggaaggcgatctcgccggaggtgctggaggcgtcgttcaacgcgacgccggagatggagaagctgttccggtccaaaaggatcgactcggagatcttcttcgcgcccaactgagcagcttccctttgccattgcgtcgtcgcgtcggtgtcgtcttaaattaggattaagtcattaataatttcatctcttatcatgagatgttactaccttctgtcagtcttatgctattgcggttgaactgtggtgattcgccacttaaaattctattctattcgagagtgccttctggtgc

SEQ ID NO: 4210 - DNA, 2409 bp, Sorghum bicolor
atggaagcaatggaggctgaagaaggtccttttctggctaatgatgccaagttgcacgcaggaatctgtagagcatttcatccttctgtatctaagctttccgccattttcccctttatcgaagcatcaagacccagaagcaagtctggtatacaggcattgtgttcactacatgtagctcttgataaagccaaagggcttctacaacattgtgcagactgcagcaggctctatttggccatcacttcggaaactgtgcttttaaagtttgagaagtctagaagccagcttcaggagagtctaaggcggactggaagcatagtaacggaagatatcggctgtaagattgtggagattgttggtgagctggaggaaattgtttttacattggatagatcagagaaggaagctggtgacgagcttatcaatttgctccagagaaacaataaaacaaatggttccagtgatagtggcgagcttgaggtcttccatatgtctgctcttaaattgggaattacatcttctagggcagcactcacggagagaagagcccttaagaagctaattgagaaggctcgttctgatgaagacaagcggaaggagcttgttgtgtcatacttgtacaatctcatgaggaagtactcaaagttcttcagaagtgagactggtgatgatacagattctcagggatcgtctccatgctcaccaacagtattaggtatggatgatatgtatgggccgtacagcaatggtcgggcattcagtagacagctttcgagcattcagtcgttcaattcgaggtttggatctttcaattctaggcttggatcattcaattgcagacgtggtggtggtccaaggtctgagaatatgtcaatccctcctgaagagcttaggtgccctatttccttacaactgatgtatgatccagtcatcatttcatctgggcagacttatgagcgtatttgcattgagaaatggttcaatgatggtcacagcacatgtcctaaaacacagcagcaacttgcccacctgtcattgactccaaactactgtgttaaggccttgattgccagctggtgtgagcagaacgaatttccagttcctgatggtccaccaggaactttcgatgtaaattggaggcttgctttctctgacactgaggctacaggttgtgtgtctgttgaaagttttgattgtaccaatgcaaagagtgtcaagattgtcccaatggagaatgttagaaaggaggagccagcaaacagtgaatcgggaacgctggatgacagctcttgtaacgatttcgagttgaacgagggctatgggaacttgctgctcttgcttcatgaaagaagtaacatgaacaagcagtgcaggttggtggagcagataaggtatcttttgaaagatgacgaggaagcaaggatccagctgggctcgaatggttttgccgaggcactggttgagttcttgaggaatgctgtgaatgatggaaatgagaaggcacaagaagttggtgcaatggctcttttcaatcttgcagtcaacaataacagaaacaagggactcctgttatctgctggagtcgccaatctacttgagcagatgatatcaaatccacgcctatctggtcctgctacagcactctaccttaatctttcctgccttcctgatgcaaaggccatcatcggttcgagccaggccgtgccattcctagtcgaccgtctgtatagccaagatgccagcgacacaaaaggcagctcctgcaagcatgacgccctgtacacactgtacaacctctcaaaccaccaggccagcgtcccggcgcttctagctgcaggcattgtggatgctctccattgcctcgtcacggaatctccagagtcggaggggcttggttggacagagaaggctctcgcagtgctcatcagcctcgcggccacccaagctggcaggaaggagatcatgtccacccctggtttggtcagcacgctagcgacgctgctagacacaggtgagccgacagagcaggagcaggcagtgtcgtgcctcctggtgatgtgcagcgccgacgacaagtgcatcccgccagtgctccaggaaggggtggtcccatcgctggtctccatctcggcggccgggacagggaggggcagggagaaggcccagaagctcctgaagttgttcagggaacagaggcagcgggacgcgccgctgccccagcagccccagcaccagcagcagcagctgctgcagagccagctggtggagggcgggaacggcggtggcggtggcgctatcgtgtgccaccgggaatcgaagccgctgtgcaagtccaagtccaggaagctgggcaggacgctgagctcgctgtggaagaacaggggcttctcgctgtaccagtgctag

SEQ ID NO: 4211 - DNA, 3076 bp, Zea mays
ctcccccttctttcctcccccgccccacgctcttcctcctccttcgtcgtcgccggtaacccccgcggagccgcgttgatagctcgccgtagggggatttgtctgccgtcgctacggcagatatcagtgctggagcgtggttactgacagggtgcggctgcattcggcctcccggcttctccttcacgcgcgcgcttggcctccctacaaggctctgtctgactggctctgaagacgtctgaaggttaaaccaagctccctgcgctgctgcccaagcggccgacccttcctgccgccgatagacccgtgctggatgcctggatcctctgtctagtgctgccgctgccagcgctactcatcctcatcctcaccctagtggagtggagatccgtccaggcgtggattgatttcttctttttctggtcagatgttggagctcaggtaatagccacccatggaagcaatggaggccgaagaaggtccttttctggctaatgatgccaagttgcacgcaggaatttgtagagcatttcatccttctgtatctaaactttccaccattttcccctttatcgaagcatcaagacccagaagcaagtctggtatacaggcattgtgttcactacatgtggctcttgataaagccaaggggcttcttcaacattgtgcagactgcagcagactctacttggcaatcacttcggaaactgtgcttttaaagtttgagaagtctagaagccagcttcaggagagtctaaggcgcattgaaagcatagtaactgaagatatcggctgtaagattgtggagattgttggtgaactggagcaaattgtttttacattggatagatcagagaaggaagctggtgatgagctgatcaatttgctacagagaaacaataaaacaaatggttctagtgataatggggaacttgaggtcttccatatttctgctcttaaattgggaattacatcttctagggcagcactcaccgaaagaagagcccttaagaagctaattgagaaggctcgttctgatgaagacaagcgtaaggagcttgttgtgtcatacttgtacaatctcatgaggaagtactcaaagttcttcagaagtgagactggtgatgatacagattctcagggatcgtctccatgctcgccaacagtattaggcgtggatgatatgtgtagtccatacatcaatggccgtgcatttggtagacagattttgagcagtcagtcgttcaattcaaggtttggatctttcaattctaggctcggatcattcaattgcagacgtgctgctggtggtggtccaaggtctgggaatatctcagtccctcctgaagaacttaggtgccctatttccttacaactcatgtatgatccagtcatcatttcatccgggcagacttatgagcgtatttgcatcgagaaatggttcaatgatggtcacagcacatgtcctaaaactcagcagcagcttgcccacctgtcattgactccaaactactgtgttaaggccctgattgccagctggtgcgagtcgaacgattttccacttcctgatggtccaccaggaacttttgatgtaaactggagacttgcttcctctgacactgaggctacaggttgtgtgtctgttgaaagctttgattgtaccagtgcaaagagcgtcaagattgtcctgatggaggatgctagaaaagaggagccagcaaacagcgtatctggaacgctggatgacggttcttgtaacgatttcgatctgaacgaaggctatgggagcctgctgctcttgcttcatgaaagaagtaacatggacaagcagtgcaggctggtggagcagataaggtatcttctgaaagacgacgaggaagcaaggatccagctaggctcaaatggctttgccgaggcactggttgagttcttgaggaatgctgtggatgatggaaatgagaaggcacaggaagtcggtgcaatggctcttttcaatctcgcagtcaacaataacagaaacaagggactcctgttatctgccggagtagccggtctacttgagcagatgatatcgaatccacgcctatctggtcctgccacagcactctaccttaacctttcctgccttcctgacgcaaaggccgccatcggttcaagccaggcggtgccattcctagtcgactgtctgtatatccaagacgccagcgacacaaacggcagctccagcaagcacgacgccctgtacacgctgtacaacctgtcgagccaccaggccagcgtgtcggcgcttctagccgcaggcatcgtggacgccctccaccgcctgctcgcggagtctgcagcgcctccggaggaggggcttggctggacagagaaggctctcgcggtgctcatcagcctggcggccaccgaggctggcaggaaggagatcgtgtccacccctggtctggtcagcacgctggcgacggttctggacacgggcgagccgacggagcaggagcaggccgtgtcgtgcctgctggtgatgtgcagcgccgacgacgagtgcgtcgcggcggtgctccgggaaggggtggtcccgtccctggtctccgtctcggcggccgggacggggcggggcagggagaaggcccagaagctcctcaagctgttcagggagcagaggcagcgggacaccgcgccggcgccgcaaccccagcagcagctgctgcagagccagctggcggagggcgggaatggtggcggtgctattatcgcgtgccaccaccgggagtcgaagccgttgttcaatgtcaagtccaggaagctgggcaggacgctgagctctctgtggaagaacaggggcttctcgctgtaccagtgctaggatgcatgctagagtagtatgtgtttttgagttgatcagtgggttgtgtacatcgtcttctgccttgttttccgcttggtccttttcctcttctctggggtattgttctgtttcggggtaagaaagaggagagtgaaaacattggtgttcttcccccacctcctcggtggggtgatgtagggcattttccagtttggctttggccttgtc

SEQ ID NO: 4212 - DNA, 2924 bp, Oryza sativa Japonica Group
gccactctccattcttcctctcctcctccccccgcttctcctccccacctccgcctccgcctccgatccgccgccgccgtcggcgaccgccggagccgcgtgtagcacgccgtctcacccccgccccccccccccaatcgctctccatttccctcccctttcgctcgctgctgctcccgcacgccgccggtgcccggatcccgctggccgacgtcgcccctgccgccgagctgcctcctcctccccttctctcgccgctcgaaatgatgttggagctctggtggtaattaaccatggatgcaatggaggccgaggaaggtccttttctggctaatgatgctaagttgcatgccggaatgtacagagcatttcatcctgcggtctcaaaacttgtagcgattttccctttcattgaagcatcaagacccagaagcaaatctggcatacaggcgctatgctctctacatgtagctctagataaagccaaaggtcttcttcaacattgtgcagattgcagcaggctctacttggccataactgcagaaactgtgcttttgaaatttgagaaagcaagaacccaacttcaggagagtcttagacgcgtggagggcatagtaacagaagaaattggttgtaagattgtagagattattgctgagttggaagaagtggtatttacattggatcaatcagagaaggaagctggtgacgaggtgatcaatttgctccagagaaacaggaaaatgaatagttccagtgatagtggggagcttgaggtttttcatatggctgcactaaagctgggaattacgtcttccagggcagcactcactgagagaagggccctgaagaagctaattgagaaggctcgttctgatgaagataagcggaaagagtatgttgtgtcatacctgtacaatctaatgaggaaatactcaaaatttttcagaagtgaggctggtgatgatactgattctcaaggatcgtctccatgctcgccgacaatattaggcatggaggacatgtatggaccctatggtaatggccgagcattcagcagacaactttcgagtattcaatcattcaattcaaggtttggatctttcaactctaggcttgggtcattcaattgtaggcgtagtggtccaaggtccgaaaacatgtcgatccctcctgaggagctccggtgccctatttccctacaactgatgtacgacccagttatcatttcatcagggcaaacttatgagcgtgtttgcattgagaaatggtttaatgatggtcacagcacctgtccaaagactcagcagcaattatctcacctgtctttgactccaaattactgtgttaaggccctaattgccagctggtgtgagcagaatgattttcctgttcctgatggtccaccaggatccttcgatgtaaattggagacttgctttatctgactccgaagcgactggctgcgtgtctcttgaaagttttgactctatcaacgtgaagagtgtcaaggtagttccattggacaacgtgagaaaagaagagccagcaaacaacgaatcgggaacattggacgacagctcttgttatgatttcgatatgaatgaggggtaccgaaacttactgctaatgcttcatgaaaaaaccaacttacacatccagtgcaggttggttgagcagataagatatcttctgaaagatgatgaggaagctagaatccagatgggctcaaatgggtttgctgaggcactagttcagttcttgaggaacgctgtgcaagatggaaatgagaaggcacaggaaattggtgccatggctctttttaaccttgctgtcaacaataacaggaacaagggacttttattgtctgctggagtaatcgatcaacttgagcagatgatatcaaatccacgcctatctgctccagccacggcactataccttaacctttcctgcctacctgaggcaaagaacatcattggttcgagccaggctgtgtcattcctagtagaccgtctgttcagtcatgaggcccgcgacacaaaaggcagctcttgcaagcatgatgccctatacacactatacaatctctccaaccaccaggccagcgtaccgtcgcttttgtctgcgggcattgtggaagctcttcactctctcctttcggagtccctggcgtctgagggcctgggttggacagagaaggcccttgcagtgctcatcagccttgcggcaacccaagctggcagaaaagatatcatgtccaccccaggtctgatcagcaccttggcgatgctgctggacaccggcgagccaacagagcaggagcagtcggtgtcctgccttttggtgatgtgctcagccgatgacaagtgcatcgcaccggtgctgcaggaaggagtggtgccttccttggtttccatctcggcaaccggcacaggcaaggggaaggagaagtcccagaagctgctcaagctgttccgggagcaaaggcagcgagatggggcacagcctgtgccgcagcaagctcagcagcagcagcagcagcagcagcagcagcagcaggcgggagagaccggtaacggcaccatggtgtgccgccgcgactcaaaacagctgtgcaagtctaaatcgaggaagctaggaaggactctgagctcactgtggaagaacaggagcttctccctgtaccaatgctagcagatttttgagctgagtttgatcagtggatatgtacatcttttcttgttccatgtttctcttgatctttcttttttttttgccttctttgttgtttccttgtgtaaagtaaaactatcttcccccccttctcggtggggtgatgtaggccatttcctctttgtttttctttgccaagatatgtgcatagctcatctttcactctacttaacaagttcagatcagatc

SEQ ID NO: 4213 - DNA, 3991 bp, Oryza sativa Japonica Group
atggatgcaatggaggccgaggaaggtccttttctggctaatgatgctaaggtatcatcttggcagtgcttttatcttgatggcaatgagagtatatatttgttcttgacctactgtcattagccaccttactggaatcttatcaaccttttctggatgtatttgttgatacatgatctaaggaaatcgtggtttatgcagttgcatgccggaatgtacagagcatttcatcctgcggtctcaaaacttgtagcgattttccctttcattgaagcatcaagacccagaagcaaatctggcatacaggcgctatgctctctacatgtagctctagataaagccaaaggtcttcttcaacattgtgcagattgcagcaggctctacttggtaagcttatgttaccagcatccccataaagttcttcagaagatccgtgccattgggatcattaaaaatgttatatgcttaaatatattgttcattttcaggccataactgcagaaactgtgcttttgaaatttgagaaagcaagaacccaacttcaggagagtcttagacgcgtggagggcatagtaacagaagaaattggttgtaaggtatgtcatgtgaaaatcctatcctcctagtacttgatttctttgaaccacaaaaccaactctgcccaagttatgttatggttttacaatttagtacaccatatggtatttcctgacatctggacctgttggtgcacaacagattgtagagattattgctgagttggaagaagtggtatttacattggatcaatcagagaaggaagctggtgacgaggtgatcaatttgctccagagaaacaggaaaatgaatagttccagtgatagtggggagcttgaggtttttcatatggctgcactaaagctgggaattacgtcttccagggcagcactcactgagagaagggccctgaagaagctaattgagaaggctcgttctgatgaagataagcggaaagagtatgttgtgtcatacctgtacaatctaatgaggaaatactcaaaatttttcagaagtgaggctggtgatgatactgattctcaaggatcgtctccatgctcgccgacaatattaggcatggaggacatgtatggaccctatggtaatggccgagcattcagcagacaactttcgagtattcaatcattcaattcaaggtttggatctttcaactctaggcttgggtcattcaattgtaggcgtagtggtccaaggtccgaaaacatgtcgatccctcctgaggagctccggtgccctatttccctacaactgatgtacgacccagttatcatttcatcagggcaaacttatgagcgtgtttgcattgagaaatggtttaatgatggtcacagcacctgtccaaagactcagcagcaattatctcacctgtctttgactccaaattactgtgttaaggccctaattgccagctggtgtgagcagaatgattttcctgttcctgatggtccaccaggatccttcgatgtaaattggagacttgctttatctgactccgaagcgactggctgcgtgtctcttgaaagttttgactctatcaacgtgaagagtgtcaaggtagttccattggacaacgtgagaaaagaagagccagcaaacaacgaatcgggaacattggacgacagctcttgttatgatttcgatatgaatgaggggtaccgaaacttactgctaatgcttcatgaaaaaaccaacttacacatccagtgcaggttggttgagcagataagatatcttctgaaagatgatgaggaagctagaatccagatgggctcaaatgggtttgctgaggcactagttcagttcttgaggaacgctgtgcaagatggaaatgagaaggcacaggaaattggtgccatggctctttttaaccttgctgtcaacaataacaggtattgaatttaatttccatttatgtgctgcttatcaattacaactagctgagttcatcttcagtatttctacttaatctgtagttttgcttaacctttgcttgtttatttcaggaacaagggacttttattgtctgctggagtaatcgatcaacttgagcagatgatatcaaatccacgcctatctgctccagccacggcactataccttaacctttcctgcctacctgaggcaaagaacatcattggttcgagccaggctgtgtcattcctagtagaccgtctgttcagtcatgaggcccgcgacacaaaaggcagctcttgcaagcatgatgccctatacacactatacaatctctccaaccaccaggccagcgtaccgtcgcttttgtctgcgggcattgtggaagctcttcactctctcctttcggagtccctggcgtctgagggcctgggttggacagagaaggcccttgcagtgctcatcagccttgcggcaacccaagctggcagaaaagatatcatgtccaccccaggtctgatcagcaccttggcgatgctgctggacaccggcgagccaacagagcaggagcagtcggtgtcctgccttttggtgatgtgctcagccgatgacaagtgcatcgcaccggtgctgcaggaaggagtggtgccttccttggtttccatctcggcaaccggcacaggcaaggggaaggagaagtcccagaagctgctcaagctgttccgggagcaaaggcagcgagatggggcacagcctgtgccgcagcaagctcagcagcagcagcagcagcagcagcagcagcagcaggcgggagagaccggtaacggcaccatggtgtgccgccgcgactcaaaacagctgtgcaagtctaaatcgaggaagctaggaaggactctgagctcactgtggaagaacaggagcttctccctgtaccaatgctagcagatttttgagctgagtttgatcagtggatatgtacatcttttcttgttccatgtttctcttgatctttcttttttttttgccttctttgttgtttccttgtgtaaagtaaaactatcttcccccccttctcggtggggtgatgtaggccatttcctctttgtttttctttgccaagatatgtgcatagctcatctttcactctacttaacaagttcagatcagatcatcagattgtctcccctgaatccatatgttcatagctctcttcacttcatttcacaagttcagatcagatcatcagattttatgaatcacaactaacatgttaacgtgtctatactctatacaggttcactcatgcagatacttgtcttcaggaggcccaactgctcaagaaattcaacatcagacagctcaagaaggtagtactaccaatcttggtacagtagttaattaaattaaatattgttgaatgctagtacctcatggtatagttttgtcccaagatgcaacagtgataagatgcagggttaggctatggcttgacaggacatggaagccaagccagtgaagacgatgacatgagatcaaaaaggaagaaaatgccacaggaggcaagacagtgattcgagggccgacatgaatgaagaaaactcgtggactggccttcaaagtttgttggtgacatttcagccttgggcccaggctactagtgttgtgcaagagagacctctgttgtgtttgtctcttagggtcaagacatgatcatgatgatgatgatgatgccacctttatctcaaaaaataatgagatcccaaaatataaacatttttagctataaatctagacaactgtgtgtccagattcatagccaaaaattgttatattttgagacggaggtaatataagctagcactttgaatctagataggcctctataaagagcttgtagtattagaatatatctaaactcgtactatattactatatttcatactatattactgtattttaggacggaggaagtatgtgtcggctttgacatcaacacgaattctggaccaagtatttttccagt

SEQ ID NO: 4214 - DNA, 2884 bp, Hordeum vulgare subsp. vulgare
ggcattattcctcccctcccccctccccactcccccctcctcctctcctctctcgcctctccccccaccccgccgcccgccgccggcgaccgacggagacacccgcggggagagatccttcccgccgcagcggccctcccgaggcattccccctcgccctcttcgctcgagacgatggtggagctcacgaggtagtcaagcatggacgcaatggaggtcgaggagagcccccttctggctattgatgccaagttacacgctggaatgtgcagagtgtttcatcctgcagtttctaaacttctagggattttcccgttcatcgaagcatcaaggcccagaagcaagtctggcatacaggcactttgttcactgcatgttgctctggataaatccaaaggtcttcttcaacattgtgcagattgcagccggctgtacctggccatcactgcagaaactgtgcatttgaagtttgagaaatcaagaagccaacttcaggaaagtctcaggcgtgtagaaagcatagtaacagaagatattggccataagattgtagagattatcggtgagttggaggaggttgtatttacattggatcaatcagagaaggaagctggcgatgagatcatcaatttgctccagagaaacagcaaaatgaacagttccagcgatagtggggagcttgaggtctttcatatggctgctctgaagctgggaattacttcttccagggcagcattgactgagcgaagagccctcaaaaagctaattgaaaaggctcgttctggagatgataagcggaaggagtttgttgtgtcctacttgtacaatctcatgaggaaatactcgaaatttttcagaagtgaagcaggtgatgataccgattctcaaggatcagccccatgttcgcctacagtattaggcatggatgacatgtatggcacctgcggtaacagccgagcattcagtagacagctttcgagcattcaatcatttaattcgaggtttgggtctttcaattcgaggcttgggtcattcaattgtagacctagtggtccaaggtcggaaaacatgtcgatccctcctgaggagctcagatgtcccatttccttgcagctgatgtatgacccggttattgtttcgtctggtcagacttatgagcgtgtttgcattgaaaaatggtttaatgatggtcacagcacatgtcccaagactcagcaacaactggcccacttgtctttgactccaaactactgtgttaaggccatgatttccagctggtgcgagcagaatgattttccagttccagatggtccaccgggatcctttgatgtaaattggaggcttgctttaactgactcccaggcgacgggctgtgtgtctgttgatagttttgacactagcaacatcaagggtgtcaaggtggttcccctggagaacgagagaaaagaagaagcggcaaacagcgaatcaggcacattggatgatagctcttgttttgagtttgatatgaatgaggggtatcggaacttgctgctggtgcttaatgaaagaaacaacatactgagccagtgcagattggttgagcagataagatatctgctgaaagacgacgaggaagcaaggatccagatgggctcaaatgggttcgctgaggctctagttcagttcttaaggtattccgtggaagaaggaaatgagaaggcacaagaagttggtgccatggctcttttcaaccttgcagtcaataataatagaaacaagggacttctgttgtctgctggaatagtggaactacttgagcagatgacgtcgaatccacgcctagctgctgcagccacggcgctctaccttaacctttcctgcctcaccgatgcaaagagcgtgatcgcttccacccaagccgtgccattcctagtggaccggctgtacaaccacgacgccagcgacccgaaagccagctcctgcaagcatgacgccctctacacgctgtacaacctctccacccaccaggccagcatcccgtcgctcctgtcggccggcatcgtggacgcgctccacacgctcttgacggactcctcggtgtcggaaggcatcggatggacggagaaggccctggcggtggccatcagcctcgcggcgaccccggccggtcggaaggagatcatgtcgaccccggggctggtgagcacgctggcgatgctgctggacacgggggagccgacggagcaggagcaggcggtgtcgtgcctgctggcgatgtgcgcgggggacgacaagtgcatcgcgccggtgctgcaggagggcgtggtgccgtcgctggtctccgtctcggcgaccggcacggggcggggccgggagaaggcccagaagctgctgaagctgttccgggagcagcggcagcgtgacggggggcaacaagccgcgtcgcagcaacagcaggtcccgcagccgcagcagcaggctgcgccggagggagggaacgggaacgggaacggcggggtgatggtgtgtcaccgggagtcgaagccgttgtgcaagtacaagtcgaggaagctggggcggacgctgagctcgctgtggaagaaccggggcttctccctctaccagtgctagcagcagcaggcagggtttttggggtctggctcgtcagtaggatctgtacatctcccctcttttcttgcttcttcttccactttggcgccgtggctgctgcttccttcgtttgggttaagtaagttgaaagagactagtgcttcttccccccctcctcggtggggtgatgtagggcatttccccctcttgccgccttgtcatcgcatcacattgtacaatgtatatatagccttgccttgttatcagatagatgcttctctccatttcagcc

SEQ ID NO: 4215 - DNA, 1459 bp, Zea mays
acacggtcacacacaccacaacccagccacccaccacctcccccaattgcctcttctcttctcccagcagctgccgcgacgcagtcctactcctgcggtgcctccagtttcgcagcaccgttgccacacatcgccaactaacgccatcgatcacccggcggccgcccagagtcctgccctgccatatccgaacctgctcctgcagctagccagcaacacagacagaataggtcggtcggtcgatcgatcgatggccagcgttatcgacggcaatggaggcagccggctggtggtgacagagctgggccacctcaaggagctggcgatgcagctggaggggcacctcggcggctcctcgccggacctctgcaagcacctcgcctcgcagatctcctccatcaccgaccgctccatcagcctgctcatcaccgccacctcatcaagcccccacggcggcgcctctgacgcgccgcccttcatcagggctactaccaagaaaaggaagaggatggacaagaagaggcatgaggtgagggtgggctcggccggaggcggcggcggcgaccatccggccgacgacggctacagctggaggaagtacggccagaaggagatccttggagccaagcacccaaggggctactaccgctgcacgcacaagagctctcagggatgtgcggcgacgaagcaagtgcagcgcaccgacgaggacccggccttcttcgacgtcgtctacctcggcgaccacacctgcgttcagagccagagggcggcagcgacggcgggtcgtcaggctgccgcggacgcgcaggcgccggagtacgacgccaacctcatggtgaagaccgaggggccggccctggagccagagcagcagcggcggggctgggaggacgcgcccacgccctttctcttctcctccacgccggcgtgccttgtgccggagcgcagccccttctccgcaccgtccacgtccgagaactggggcgtgtccccggcgacctcggactccaaccacgtcgtctctttcccgcctttcgaggtcgccgccgccgctgccgcgcagttcgagttcgaggaagtcatgtcagcgatcgacagagccgacggcgagtttctcgaggacctcgacatctatgtctcaagcttcttagcgtgatctgctggatgtaatgtaaccgatgaacgctagggaatgggaatctgaggcagctgttaccatgagttgctctctgccgtttgtccaggggcagagcagggaagaacacatgttcttcctcggcccgtcccgttgtaaaccttagggtgtgagaatattgaatgtcccatctctctctctctttttcttcggtcgagggtttgcaaggaaaacaatttcgtaatagtgctgtcagttcagctaaacatgtgagtttctcgtgaatttaaacatttttccaacggaaaaaaaaaaaaaaaa

SEQ ID NO: 4216 - DNA, 933 bp, Sorghum bicolor
atggccgccagcgtcgtcgacggcaatggaggcagcggagggctggtggtgacggagctgggccacgtcaaggagctagcgaggcagctggaggcgcagctgggcggctcctcgcccgacctctgcaagcacctcgcctcgcagatctcctccatcgccgagcgctccatcagcctgctcatcaccacctcctccggcctcgccggcgcccggaagcgctccgccgtgcccttcgtcaagggcaccaagaaaaggaagaccatggacaagaagaggcatgaggtgagggtgagctcggcggccggcgaccacccggccgacgacggccacagctggaggaagtacggccagaaggacatccttggagccaagcacccaaggggatactaccgctgcacgcaccggcactctcagggatgcgcggcgacgaagcaagtgcagcgcaccgacgaggacccgacctcctttgacgtcgtctacctcggcgaccacacctgcgttcagagccagtgggcggcggcggcgggccaggctgccgcggacgcgctggcgccggagtacaacggcaagccgggcaccaacctgacggtgaagaccgaggggccgaccgtggagccagctgagcagcaggtgcagggctgggacgcgcccacgcccttctgcttctcctccacgccggcgacggcgacggcgagctggtgcctcgtgccggagctcagcccccctttctccgcgccgtccacgtccaacaactggggcgtctccccggcgacctcggactccaaccacgtcgtctctttcccgcctttcgaggtcgccggcgacgacgtgcagttcggccggttcgaagaagtcatgtcagcgatcgacagagccgacggcgacgggttcctcgacgacctcgacattgacgtctcaagcttcttggtgtga

SEQ ID NO: 4217 - DNA, 1393 bp, Sorghum bicolor; identical to SEQ ID NO: 1086

SEQ ID NO: 4218 - DNA, 1449 bp, Zea mays
cacccctccccacccccatcccacgcagcacagcggcagacaccgcaccgcgagtgacgcggcagcaaaaaaccatggcggctctgccgttctcgacgcggcggcccttctcgtcgccgtgcttcatcctctgcttcctcctcggcttcgtcgccggcctcttccccttcgcgcaccgccacctccacctcgacctcgacctccgccacctcccgctcgcggaccctcctcccgctgcgccgacccagcgggccctagtccggccgccaccgacgacgaccctgatcgtcgtgacgccgacccgcgcgcgcccgctgcaggcgtactacctgcaccgcctcgcgcacaccctccgcctcgtcccgcagccgctgctctggctcgtcgtcgaccgcggcgccgccacgcgcgagaccgccgcgctgctccgcggctgcggcctcatgtaccgccacctgccctcccagtcccaccgcgacgcgcccggtgctcgccggacgaggcccgagcacccggcggcgcgcggcctgcgccagaggaacgcggcgctcgaccacatcgagcaccaccgcatccacggcctcgtctacttcgccgacgaggacaacgtgtactcccttgacctcttcgaccagcttcgcggcataaggagttttggcacctggccagtcgcaatgctgggcgtggggaagagcaagacacttgtggaagggccggtttgtgacaacagccaggtagtgggatggcacacgaacgagaggaccaagaggcaacgaaggtttcatgtcaatacttcgggctttgctttcaatagcagtatgctctgggacgccgacaagagggctcgtcaggcgtggaattacatccggctgctggacacggtcagagatgggtttcaggcaacaacatttatagagcagcttgtagaagatgaaactcatatggagggcataccaactggttgttcaaaaattatgaatgttaatcttcgcctagaagataaacatcttgtatatccgaaggagtggcagatgacagaaaacctggatgtgttaattcctctctgagccagaacagaggcataccgccctgcagcttcagcaatcgagcacatggagacgcggccgagcatgacgtgcgtgtgtggcatatgtcaagctgttgtgggtcagcggaggtttaggttaggtgtgtacatcacccaaggaaatatgcacttaactttttcgcagatttgtttgtagcatagagctaaaagctcccgattaggtacatgaatacatcgtacaagaggatcttacgtccccagtagggccttagcctttgtgggcatttaaggtaaatacatctaactttttttggtttattgaagtggatgcggtgactacttttaccagtatagagactatagataacattggttaaaaaaaaaaaaaaaaaaaaaaaaaa

SEQ ID NO: 4219 - DNA, 1955 bp, Zea mays; identical to SEQ ID NO: 1087

SEQ ID NO: 4220 - DNA, 2584 bp, Triticum aestivum
atgggttgttctcctttcttctgctataaaagtggggcaacacgccagcaaatttctacgcataccgaaggtagatatctcttatacagactgttctacactcttgtggactatgatatggtcaccttcttcatattgccgtatttaaatacttaacctaatttttacagacctccctggtgatattaatacaataagatacacttataaggagctagcaagggcaacagaaaattttaacccatccaacaagattggtgaggggggttttggatctgtatataaggtagtgtgtgtaaccttcaactaataagccaaatgaaattctaatggaataaatgtacacgtttaaagtttgatcacataatggtgtaggggcggctaaggaatggaaaacttattgctgtcaaggtgttatctgtagaatcaagacaaggactaaaggagtttctgaatgaactgatgtcaatttccaacatatctcatggcaatcttgtcagcctttatggctattgtgtggaaggaaaccagaggatccttgtctacaattaccttgagaataatagccttgcacaaacacttctaggtaattcttggttagttcttttcatcgtactgttcttcaaaacttaatacatatttgctgaaaaaggtctatattctaatgttccttagcttttctcttcttatttcttattaggttctggccgcagcaatatccagttcaattggagaagtagagtaaatatttgccttggtatcgcccgaggattagcatacctccatgatgatgtcaatccccacattgttcatcgggatatcaaagcaagcaatatacttcttgataaggatctcacccccaaaatttctgatttcggtttagcaaagcttctacctccaaatgcgtcacatattagcacacgggttgcaggaacattgtaagttaattttgtcctatggaactatctacctataatgaattatcatctgcagtgcatgtttacttctcccaccgtcccataatataagacgttattacatccaatacgctcaacgtcttatattatgggacggagggagtagtttctttgttttgtactgtgtgccttcagaagctactgcttataattggcatttcaagttaattggttgaattttatacaccccaaaagaatctttcacatatgatgaaaccacaccacctgtttcataggagaagttagaggcaattacaattgaaataacaaataaagacatagttattcataaatgatcattatggtctaataaacttgcggcattacttactcggttttacttcacagaggttacttggctcctgagtacgccattcgaggacaagtgacacggaagtcagatgtttatagttttggtgttttgcttctggaaatagtcagtgggagatccaacaccagttcaagattaccctatgaagatcagatacttctggaaaaggttagatgaaatagaataccatatttctttctcttcttttcccatttcttattggtaaaaagtaaactattagtccctccatcccataatataagaacgtttttcaaactaacaaagcttgaaaagcgttcttatattatgggacggagggagtatattttaccataatgaatgaattagttttagctgaagttatttacaatttgagtttgatggatggatggtactggcatgtcagaaatttggagtgcataaaagcagtcttgatttctggtaaaaaaaactagtgtagatgcatacaactcttgcatttcagaatgttagccatgccatgtccatttttcatttattaaattagtaatacaatacaaaaaaatgattactactccctccgttcctaaatataagtctttctagggattctaatatggactacatccggagcaaaacgagtgaatctacactctaaactacacccatatgtagtccatattgaaaatctctagaaagacttatatttaggaacggaggtagtattatcatgcacttacatcttagttgctcactggcaagcacattagctgcttccttgtctctacataaatgcataaatcgtgtataacctcttagcatgactggagggagcaaaaatttctaactcatggacttctgttctttgctgctacagttcccagaggttaccaacggggttctcctcttgcagacatggatgtattatgagcagggagatttggcgaaaatcatagacagttctgcgggtgatgatttggatattgaacaagcctgcaggttcctgaaagttggacttctctgtacacaagatgtcacaagacatcgacccactatgtcaactgtcgtcagcatgctaacaggcgaaaaggatgttgactcggagaagatcagcaagcccgctacaattagcgactttatggaccttaagatcaggagcatgaggagagaaaataacattgctttcgcttcatcctccacgttgctatccactatcatggcacactcttctcctttgttgtcacaagagacgacacaagcctccataacattcaccgcaatatcagagcgtgagtga

SEQ ID NO: 4221 - DNA, 2432 bp, Triticum aestivum
atgggttgttctcctttcttctgctataaaagtggggcaacacgccagcaaatttctactcatactgaaggtagatatctcttacacagactgttctacactcttgtggactatgatatggtcaccttcttcatattgccatatttaaatacttaacctaatttttacagacctccctggtgatattaatacaataagatacacttatagggagctagcaagggcaacagaaaattttaacccatccaacaagattggtgagggtggttttggatcggtatataaggtagtgtgtgtaaccttcaactaataagccaaatgaaattctaatggaataaatgaacatgtttaaggtttgatcacataatggtgtaggggcggccaaggaatggaaaacttattgctgtcaaggtgttatctgtagaatcaagacaaggactaaaggagtttctgaatgaactgatgtcaatttccaacatatctcatggcaatcttgtcagcctttatggctattgtgtggaaggaaaccagaggatccttgtctacaattaccttgagaataatagccttgcacaaacacttctaggtaattcttggttagttcttttcatcgtactgttcttcagaacttgtacatatttgctaaaaagaggtctatattctaatgctccttagcttttctcttcttatttcttattaggttctggccgcagcaatatccagttcaattggagaagtagagtaaatatttgccttggtatcgcccgaggattagcatacctccatgatgatgtcaatccccacattgttcatcgggatatcaaagcaagcaatatacttcttgataaggatctcacccccaaaatttctgatttcggtttagcaaagcttctacctccaaatgcgtcacatattagcacacgggttgcaggaacattgtaagttaattttgtcatatggaactatctacctataatgaattatcatctgcattgcatgtttactactcccaccgtcccataatataggacgttattacatccaatatgctcagtgtcttatattatgggacggagggagaagtttctttgttttgtactgtgtgccttcagaagctattgcttataattggcatttcaagttaattggttgaatttaatacaccccaaaagaatctttcacatataatgaaaccacaccacctgtttcataggagaagttagaggcaattacaattgaaataacaaataaagacatagttattcataaatgatcattatggtttgataaacttgcggcattacttactcagttttacttcacagaggttacttggctcctgagtatgccattcgaggacaagtgacacggaagtcagatgtttatagttttggtgttttgcttcttgaaatagtcagtgggagatccaacaccagttcaagattaccctatgaagaccagatacttctggaaaaggttagatgaaatagaataccatatttctttctcttcttttcccagcccttattggtaaaaagtaaactattactccctccgtcccataatataagaacgtttttcaaactaacaaagcttgaaaaacgttcttatattatgggacggagggagtatattttaccataatgaatgaattagttgttagctgaagttatttacaatttgagtttgatggatggatggtactggcacgtcagaaatttggagtgcataaaagcagtcttgatttctgttaaaaaaactagtgtagatgcatacaactcttgcatttcagaatgttagccatgccatgtccatttttcatttattaaattagtaatacaatacaaaaaaatgattactattatcatgcacttacattttagttgctcactggcaagcacattagctgcttccttgtctctacataaatgcataaatcgtttataacctcttagcatgactggagggagcaaatattctaacccatggacttttgttctttgctgctacagttcccagaggttaccaatggggttctcctcttgcagacatggatgtattatgagcagggagatttggcgaaaatcatagacagttctgcgggtgatgatatggatattgaacaagcctgcaggttcctgaaagttggacttctctgtacacaagatgtcacaagacatcgacccactatgtcaactgtcgtcagcatgctaacaggcgaaaaggatgttgactcggagaagatcagcaagcccgctacaattagcgactttatggaccttaagatcaggagcatgaggagagaaaataacattgcattcgcttcatcctccacgttgctatccactatcatggcacactcttctcctttgttgtcgcaagagacgacacaagcctccatcacattcaccgcaatatcagagcgtgagtga

SEQ ID NO: 4222 - DNA, 1876 bp, Hordeum vulgare subsp. vulgare
gaaataatcactcgcgacccaaaccctcacagtccgacgccgccatttcccaccctcctcctcctccttccagccgccgcccgccgtccaaggctgcgctcgtgctcgggaaccctcgcgtccgccgacgactcgctggtgccaggcgcttgagcggtgggctggagctgctcgcccgcctgcgcgcgctgcggcctgcgggggtggcggtaaattcttctgcgctctcgcctcgtctccgctccgagttgcccggggctgttcccctggtctcgacggcggattcggcagcggctgatcaggatatgatggcagctgtttaaggttgatgaaatatttgtggggatatcataagtgcaaacgtatgtgttgaactgacagcgacgaggcagatatattttgagaatatacataatgggttgttctcctttcttctgctatagaagtggggcaacacgtcagcaaatttctacacatactgaagacctccctggtgatattaatacaataaggtacacttatagggagctggcaagggcaacagaaaattttaacccatccaacaagattggtgaggggggttttgggtctgtatataaggggcggctaaggaatggaaaacttattgctgtcaaggtgctatctgtagaatcaagacaaggactaaaggagtttctgaatgaacttatgtcaatttccaacatatctcatggcaatcttgtcagcctttatgggtattgtgtggaaggaaaccagaggatcctagtatacaattaccttgagaataatagccttgcacaaacacttctaggttctggccgcaacaatatccagttcaattggagaagtagagtaaatatttgccttggtattgcccgcggattagcatacctccatgatgatgtcaatccccacattgttcatcgggatatcaaagcaagcaatatacttcttgataaggatctcacccccaaaatatctgattttggtttagcaaaacttctacctccaaatgcgtcacatattagcacacgggttgcaggaacattaggttacttggctcctgagtatgccattcgaggacaagtgacacggaagtcagatgtttatagttttggtgttttgcttctggaaatagtcagtgggagatccaacaccagttcaagattaccctatgaagaccagatacttctggaaaagttcccagaggttaccaatggggttctcctcttgcagacatggatgtattatgagcagggagatttggcgaaaatcatagacagttctgtgggtgatgatttggatgttgaacaagcctgcaggttcctgaaaattggacttctctgtacacaagatgtcacaagacatcgacccactatgtcaactgttgtcagcatgctgacgggcgaaaaggatgttgagtcggagaagatcagcaagcccgctacaattagcgactttatggaccttaagatcaggagcatgaggagagaaaataacatagctttcgcctcatcctccacgttgctatccactatcatggcacactcttctcctttgttgtcgcaagagacgacacaagcctccataacattcaccacaatatcagagcatgaatgacctgaagttggttgcaaatacgaagaccatgtagagaagtagcatagccagatacccctttccagttttttttcttgctagtgtatagattcacttcgtttatagtgtaaacagcattgctgggtcaaagaagttcatgaattttacttgtgtgtgtgtactttactagattgatggcactgtcattgtgtaatttgtacatgtacaccctgtctgttgcttgtttggtggaaaaaaaaaaacaagtttgagatcc

SEQ ID NO: 4223 - DNA, 1206 bp, Dasypyrum villosum
atgggttgttctcctttcttttgctataaaagtggggcaacacgccagcaaatttctacacatactgaagacctccttggtgatattaatacaataagatacacttataaggagctagcaaaggcaacagaaaattttaacccctccaacaagattggtgaggggggttttggatctgtatataaggggcggctaaggaatggaaaacttattgctgtcaaggtgttatctgtagaatcaagacaaggattaaaggagtttctgaatgaactgatgtcaatttccaacatatctcatggcaatcttgtcagcctttatggctattgtgtggaaggaaaccagaggatccttgtttacaattaccttgagaataatagcctagcacaaacacttctaggttctggccgcagcaatatccagttcaattggagaagtagagtaaatatttgccttggtatcgcccgaggattagcataccttcatgatgatgtcaatccccacattgttcatcgggatatcaaagcaagcaatatacttcttgataaggatctcacccccaaaatttctgatttcggtttagcaaagcttctacctccaaatgcgtcacatattagcacacgggttgcaggaacattaggttacttggctcctgagtatgccattcgaggacaagtgacacggaagtcagatgtttatagttttggtgttttgcttctggaaatagtcagtgggagatccaacaccagttcaagattaccctatgaagaccaaatacttttggaaaagttcccagaggttaccaatggggttctcctcttgcagacatggatgtattatgagcagggagatttggtgaaaatcatagacagttctgtgggtgatgatttggatattgaacaagcctgcaggttcctgaaagttggacttctctgtacacaagatgtcacaagacatcgacccaccatgtcaactgtcgtcagcatgctagcaggcgaaaaggatgttgactcggagaagatcagcaagcccgctacaattagcgactttatggacctcaagatcaggagcatgaggagagaaaataacatagctttcgcttcttcctccacgttgctatccactatcatggcacactcttctccattgttgtcgcaagagacgacacaagcctccttaacattcaccgcaatatcagagtgtgagtga

SEQ ID NO: 4224 - DNA, 2381 bp, Triticum aestivum
atgggttgttctcctttcttctgctataaaagtggggcaacacgccagcaaatttctacgcatactgaaggtagatatcttttatacagactgttctacactcttgtggactatgatatggtcaccttcttcatattgccatatttaaatacttaacctaatttttacagacctccctggtgatattaatacaataagatacacttataaggagctagcaagggcaacagaaaatttcaacccatccaacaagattggcgaggggggttttggatctgtatataaggtagtgtgtgtaatcttcaactaataagccaaatggaattctaatggaataaatgtacacgtttaaagtttgatcatataatggtgcaggggcggctaaggaatggaaaacttattgctgtcgaggtgttatctgtagaatcaagacaaggactaaaggagtttctgaatgaactgatgtcaatttccaacatatctcatggcaatcttgtcagcctttatggctatcgtgtggaaggaaaccagaggatccttgtctacaattaccttgagaataatagccttgcacaaacacttctaggtaattcttgattagttcttttcatcgtactgttcttcaaaacttatacatatatgctaaaaaaggtatatattctaatgttccttagcttttttcttcttatttcttattaggttctggccgcagcaatatccagttcaattggagaagtagagtaaatatttgccttggtatcgcccgaagattagcgtacctccatgatgatgtcaatccccacattgttcatcgggatatcaaagcaagcaatatacttcttgataaggatctcacccccaaaatttctgatttcggtttagcaaagcttctacctccaaatgcgacacatattagcacacgggttgcaggaacattgtaagttaattttgtcatatggaactatctacctataatgaattatcatctgcagtccatgtttactactcccactgtcccataatataagatgttattgcatccaatatgtgggccttcagaagctactgcttataattggcatttcaagttaattggttgaatttaatacaccccaaaagaatctttcacatatgatgaaaccacaccacctgtttcataggagaagttagaggcagttacaattgaaataacaaataaagacatagttattcataaatgatcattatggtcttataaacttgcgacattacttactcagttttacttcacagaggttgcttggctcctgagtatgctattcgaggacaagtgacacggaagtcagatgtttatagttttggtgttttgcttctggaaatagtcagtgggagatccaacaccggttcaagattaccctatgaagaccagatacttctggaaaaggttggatgaaatagaataccatatttctttctcttcttttcccattccttatattggtaaaaagtaaactattactccctccgtcccattatataagaacgtttttcaaactaacaaagcttgaaaaacattcttatattatgggacggagggtgtatattgtaccataatgaatgaattagtttttagccgaagttatttacagtttgagtttgatggatggatggtactggcacgtcagaaatttggagtgaataaaagcagtcttgatttctggtaaaaagaactactgtagatgcatacaactcttgcattttagaatgttagccatgccatgtccatttttcatttattaaattagtaatacaatacaaaaaaatgattactattatcatgcacttacattttagttgctcgctggcaagcacgctagctgcttcttgtctctacataaatgcataaatcgtgtataacctcttagcatgactggagggagcaaatattctaactcatggacttttgttctttgctgctacagttcccagaggttaccaatggggttctcctcttgcagacatggatgtattatgagcagggagatttggcgaaaatcatagacagttctgcgggtgatgatttggatattgaacaagcctgcaggttcctgaaagttggacttctctgtacacaagatgtcacaagacatcgacccactatgtcaactgtcgtcagcatgctaacaggcgaaaaggatgttgactcggagaagatcagcaagcccgctacaattagcgactttatggaccttaagatcaggagcatgaggagagaaaataacattgctttcgcttcatcccccacgttgctatccactatcatggcacactcttctcctttgttgtcgcaagagacgacacaagcctccatcacattcaccacaatatcagagcgtgagtga

SEQ ID NO: 4225 - DNA, 1735 bp, Oryza sativa Japonica Group
ttcccgattcccactgcggagaagtcaaatacggccacctggttcgctacaacccaagcccaccgccgctgcgaagctgccattcgccgacgaacagctcgccggagaggctgctttcccggagctttgagcttcttggactagctctgctcggattcttgcttggttgggattatcaggacatgatggcagctgttgaaaattgatgacatgcttatgtggatattcacaagtgaaactgtatttgttgaactgcagaattaaggccatcatagtagttttagatttcggtaatgggttgtttttgtatatttggcaagagaagggcaacccgacagcaaagttctcagcataatgatgacccctctggtgatatgaatataacaaaattcacttacaaggagctttcaagggttactgaaaattttagcccgtctaataagattggtgagggaggttttggatctgtgtataagggaaagctaaggaatggaaagcttgttgccgtcaaggtgctatctttagagtcaagacagggagcgaaggaatttctgaacgaactcatggcaatttcaaacgtatctcatgaaaatcttgtcaagctttatggctattgtgtggaaggaaaccaaagaatccttgtctacaattatcttgaaaataatagccttgcacaaacacttttgggttatggccacagcaacatccagttcaactgggcaactcgagtaaatatttgtgttggcatcgcccgtggactaacatacctccatgaagttgtaaatccccacattgttcaccgggatatcaaagcaagcaatatacttctagataaagatcttacgccgaaaatatctgattttggtttagcaaagcttttgcctccagatgcatcacatgttagcacaagggttgctggaacattaggttacttggctccagagtatgccattcgaggacaagtgacacggaagtcagatgtttatagttttggtgttctgttactagaaatagttagtgggagatccaacaccaatacaagattaccctatgaagatcagatacttcttgaaaggacatgggtgcactatgaagagggtgatttggagaaaatcatagacgcttctttgggtgatgacttggatgttgcacaagcctgtatgttcctgaaaattgggcttttgtgtacacaagatgtcacgaaacatcgacccacaatgtcgatggttgtccgcatgctaacaggtgaaatggatgttgagctggcgaagatcagcaagcccgcaataatcagtgactttatggatcttaaggtcaggagcatgaggaaagaagtggacatagtttcatcctcaacatccacattgctatcttccatcatggcacactcttctcctttgttgtcgcaagagacaacagaagcctccatgacattcaccgcgatatcagatcgtgagtgacccgaggttgaatgcagatacgaagattgcatcgacaaaaggtagtgtaggagaaatgttttccagaaatctttttgctggtttgatttttttttcgatgtatagatttacttcatttatagcctgaaaagcagtctagagtgaagaaagtacatgatagtatatcttgtttgttcatggaatgtctcctgtttttgaatgtgcaatggacacttcttcagttcttaattgtacacgacaccttgtctgctgcttgtgttctgagataaattgcc

SEQ ID NO: 4226 - DNA, 1644 bp, Oryza sativa Japonica Group
atggcggcgcctcctctgctgagcctgagccagcggctactcttcctctccctctccctccccaagccacagctcgcccccaacccctcctctttctcccccacgcgcgccgcctccaccgccccgccacctccggaaggggcgggccccgccgcgccatcccgcggggaccgcttcctcggcacccagctcgcggccgaggccgccgcccgcgtcctcgctccggaggacgccgagaggcgccgccgccgccgggagaagcgcaaggccctcgcgcggaagccctccgccgccgcctgctacggctgcggcgcgccgctgcagacggccgacgaggccgcgcccggctacgtccaccccgccacctacgacctgaagaagagacaccatcagctgagaaccgtgctatgtgggagatgcaagctcttgtctcatggccacatgatcactgctgttggtggccatggcggctatcctggagggaagcagttcgtttccgcggaccaactcagggacaagctctcctaccttcgtcatgagaaagctttgattatcaagctggttgacatagttgacttcaatgggagcttcctggcgcgtgtgcgcgattttgctggtgctaatcctattatactagtcatcacaaaggttgatctccttcctagagatacagatttgaattgcattggcgactgggttgttgaggcagttgtcaagaagaagctcaacgtacttagtgtccatttgacaagctcaaagtcactcgttggcgtcactggggttatatcagagattcagcaggaaaagaagggccgagatgtatatatactgggttcagcaaatgttgggaaatctgcatttataagtgctatgctaaggacgatggcatataaggatccagtggcagctgcagctcaaaaatacaagccgatacaatctgctgttcctggaacgacccttggtcctattcaaattgaagcatttttaggaggcgggaaattatatgatacacctggagtccatcttcaccaccggcaagcagcagttatccatgctgatgatctgccttctcttgcaccacaaagtcgtctaagggcacggtgttttcctgctaatgatacagatgttggattgagtgggaattcattattctggggtggactagtccgtattgatgttgtcaaggctcttccacgcacacgactgacgttctatggacccaagaagctaaagattaatatggtcccaaccacagaagcagatgaattttatgagagagaagttggagttacattgactcccccagctggcaaagagaaggctgaaggatgggttggtctgcagggtgttcgtgagttgcagataaaatacgaagagtctgatagacctgcttgtgacattgcaatttctggtctcgggtgggttgcggttgagccacttggtgtgccatcaagcaacccagatgagagtgctgaggaagaagacaatgagagtggtgaactgcatttgagagtacatgttcccaagcctgttgagatctttgtccgacctccattgcctgttggtaaagcagcatcgcaatggtacagataccaggagttgaccgaggaagaagaggagttgagacctaaatggcattactga

SEQ ID NO: 4227 - DNA, 1959 bp, Zea mays
ccggcccggataaggtaaggagaggataccttcactgctctgcggctgctccgccacgccgccgtccatcgtccatcgtccatggcgtcaccgcaccttcctttcctctccttccccaaaacattaccgccgctacctcccccactcaagacccacgcccaccgcacctccctagccgccgctcctgctccgccgcccgccccgcctgacggcgcggggcccgccgcgcccacgcgtggggaccgcttcctcggccgccagctggccaccgaggccgccgcgcgcgtgctcgcgcccgaggacgccgacaggcggcgccgacgcaaggagaagcgccgggccttggcacggaagccctccggcctcgcatcctgctacggctgcggcgccccgctgcagacggcggaggaggccgcgccgggatacgtcgacccggacacgtaccaactgaagaagaggcatcaccaacttagaaccgttctatgtgggaggtgcaagctgctgtctcatggccacatggttactgctgttggtggccacggcggttatccagggggcaagaagtttgtttctgcggaacagctcagggagaagctgtcatacctccgtcacgagaaagcgctcatagtcaaattggttgacatcgttgacttcaatggaagtttcctggcacgtgtacgcgattttgctggtgctaatcctattatacttgtgataacaaaggttgatctccttcccagagatactgatttgaattgtataggcgactgggttgtcgagtcagttgtcaagaagaagcttaacgtccttagtgtccatttgacaagctcaaagtcattggtcggtatcacaggggttatatcagagattcatcaggaaaggaagggccgagatgtatatatactgggttccgcaaatgttggaaaatctgcatttatcagtgcaatgctaagaacaatggcgtacaaggacccggtagcagcggcagctcaaaaatacaagccaatacagtctgctgttcctggaacaacccttggccctattcaaattgaagcatttttaggcggagggaaattgtatgatacacctggagtccaccttcaccataggcaggcagcagttatccatgctgatgatctgccttctcttgcaccacaaagtcgtttgaaagggcgatgttttccggctaatgatacagatgttgaattgagcgggaattcattgttctgggctgggctagtccgcattgatgttatcaaggctcttccacgttcacggctgacattctatgggcccaagaagctaaagattaatatggtcccgacaacagaagctgatcaattttacgagactgaagttggggtcacattgactccgccaactggtaaggagagagctgaaggatggacagggcttcaaggggttcgcgagttgaagataaaatatgaggaacgtgacaggcctgcctgtgacatcgcgatctctgggcttgggtggatttctgtggagccatcaggtgtgccttcaaacagcgctgaggaagtttatgatggcggtgagctgcatctggtggtacatgtgcccaaaccggttgaggtcttcatgcgtcctccattacctgtcggcaaagcagcgtcgcaatggtaccggtatcaagagctgacagaggaagaagaggagctgaggcctaaatggcattactgatgctgctctgtttctctagggctggctctagcagtagtacagatttctgtaatccaaatatttagcagagtgttaggacctggtgatgaaatggattcagaaaacaagttttgaataaatctgtctctggtggtgtctatttagcactttgctttggcatgaggaaagaggaatcctcccatgtcctgcacatgtactcggaatgaaggaccttccagacaaggtattgaagagatttaccaatttaatttcggc

SEQ ID NO: 4228 - DNA, 1859 bp, Medicago truncatula
gcaagcaaaagctcatcatcaatggcgcttaaaaccctatccactttcttaacccctctttctctcccaaaccccaaattccctcaaattcactccaaaccttgtctcattctctgcgaattctctcgtccttccaaatcacgcttaccagaaggcaccggagccgctgctccgtcaccaggcgagaagttcctcgaacgccagcagtcatttgaaccaaccaaactcatccccaaacagaacaacagtaaaaagaaagagaagcctcttaaagcttccatttccgtagcttcttgctatggctgtggcgctcctttacaaacttctgataatgacgctcctggatttgtccactccgaaacctatgaattgaagaagaaacatcaccagcttaaaactgttctatgtgggcggtgccagcttttgtctcatggtgaaatgataactgctgttggaggacatggaggatactctggcgggaaacagttcattactgcagaagatcttcgacaaaaattgtctcatttgcgtgatgccaaagctctaattgtcaaattggttgatgttgttgacttcaatggcagttttttgtcccgagtgcgagatcttgctggtgctaatccaataatcatggttgtgactaaggttgatctccttccaagagatactgattttaattgtgttggggattgggttgtagaggctatcacaagaaagaaactaaatgttctcagtgtccatctcacaagttcaaaatcattggtaggaataactggagtgatatcagaaatccagaaagagaagaagggaagagatgtttacattctgggttcagcaaatgttggtaaatctgctttcatcaacgccttattaaagacaatgtcatataatgatccagtggctgcagctgcacaaagatacaaaccagtacagtctgctgttcctggaactaccttagggccaattcaaattaatgctttttttggaggagggaaactgtatgacactccaggagttcatctccaccacaggcaaactgcagttgttccttccgaagatctatcctcccttgctcctaaaagccgactgaggggcctatctttcccgagttcacaagtactttccgacaatacaaacaaaggtgcttcaacagtaaatggcttgaatggattttcaatattttggggaggtcttgttagaattgatgtcttgaaggctctaccggaaacatgtttaactttttacgggcctaagaggatgccaattcatatggtgcccacggagaaagcagatgaattttatcagaaagaacttggagttctgctaaccccaccaagtggaagagagaaggctgagcactggagaggacttgactcaaaacgtaaattgcaaataaaatttgaagatgctgaaaggccagcttgtgatattgctatatcaggtctaggatggctttctgttgagccggttggcaggtcacacagattctcacaacaaaatgcaatagacactacaggcgaattgcttttagccgtacatgtccccaaacctgttgagatttttacgaggccaccattaccagtaggcaaggctggggcagagtggtacgagtatgcagaattaacggataaagaacaggaaatgagaccaaaatggtacttttgaattctgtgtattctttgtttttccttttacttatttttggggggaggagggtacatggaatgctatttctatgatttgaaattttgacctctacccaaccaagttctcaacaaccaatgttaaatgtattattaatgtgactaatacaaccgaggcatcagtttgttcaaaaggaaggaaatttacagaaattt

SEQ ID NO: 4229 - DNA, 2327 bp, Sorghum bicolor
atggcgggcggtggaggaggagggccggggccggggcgggtgaaggcggggagccgcccgccgtgggtcgggctggcggcggcggtgtgggtgcaggtggcggcggggagcgcctacgtgttcccgctctactcgcacgccatcaaggaggcgctcgggtacaaccagcaggcgctcaccatgctcggcgtcggcaacgacgtcggcgagaacgtggggctcgtcccgggggtgctcgccaaccgcctcccgccctggctcatcctcgtcatcggctccgcctgcgccttcttcggcttcggcacgctctggctcgccgtcaccaagaccgtcgccatgccttactgggtgttatggatagctttatgtattggcacaaacagcagtgcatggttgggcactgctgctcttgtgaccaacatgaggaatttccctctcagccgaggcactgttgctggtctcatcaagggttatgttgctgttagtgctgctgtctacactgaaacgtttaatggaatgcttgggaattcgcctacaaatcttttgctgttgcttgcgttggggatcccaacagcatgtattgtggtgatgtattttgttaggccttgcactccatcactggatgaggacaactcaacagaacacagtcatttcatgtacacacaaatctcaagtgtggttctcggaatataccttatggttgctacaatacttggtgatactttaaaactaagtcaggctgtcacctatcttttatttggtataatgatacttttgctccttgctccacttgcaataccaataaagatgacactttatccaaacaaacaaacaaaggaaaaacccagcacccttgctccatcttattcaactgatagtctgtctggtgcggacccagagaactcacaaccacttctgggcagtgcctcaacaacatttgctacaggtaccaatgaatctgatgacagtactgatttggatcttctattggctgagggtgagggagcagtgaatttgaaaaagaaaagaggaccaagacggggggatgatttcacattccttgaagccctagtaaaggcagacttctggctactgtttgttgtttacttttgtggagttggcacaggtgtcactgttctcaacaacctggctcaaattggaatgtctgttggtgctaatgacacaactattttgttgtgcctctttggcttctgcaactttgttggccgtatccttggtggatctgtctctgaacatttcgtaaggtcaaggatgctccctcgtcctttctggatgatgtgcacacaaataatcatggtggtaacgttcctgctcttcgcaactggccttcatagcttgatttatgtttcaactacactccttgggatctgctacggagtccaatttgctgtcatgataccaacggtctcggagctttttgggctgaaggacttcgggctaatgtacaacttcatgctgttagtgaatccacttggtgcattctttttctcagctcttcttgctggctacatctatgacaaggaggcagcaaggcagcacccaggtgtgctggagccttccgactgttatgggcctgattgtttcagattgactttctatgtctgtgccatcgtgtgttgctgcggtaccttgttgagcgtgctattcatatcgaggataaagccggtctatcagatgctctacgcaagtggatcgttcagacatcctcggagccaacagcagctccactgatgttgcatatacaccatacagtcatgccaacaaatattgagttttgggaatgaaatcataatgttctggagaaaaaatatctgctggatgccacggtgttgtatattgcattaagggcgcttgattcgcccccctgtttgtatgagagagttgttttgatttcatttttccctgttctgtaaaggtcgccagcctagtagatagaatacagtgggtcatcaatatataaaccaggtgcctacttatatggcaggtcgtgtgcatcagcaagtctgaggatgtcataaagcgaatgtatcttctttataccatgactttcctggcgtcagatgttgctgctgctgcttaaaaaaaatggatggtgaattgccttataacttatgttttggtgtttgtcatgctaccactgccagtgccaggaaactgagttgtggacgtagtcgtctagtggaacaactgtaacaagatagcccctttattttccgcttggtcactctgctttaaattgttattgtatgtcgaaacactgaaaattctggtttaatcaatgaaactggaagcactatttcatttgt

SEQ ID NO: 4230 - DNA, 2057 bp, Oryza sativa Japonica Group
ggggagccggccgccgtgggtggggctggcggcggcggtgtgggtgcaggtggcggcggggagcgcgtacgtgttcccgctctactcgcacgccatcaaggaggcgctggggtacaaccagaaggcgctcaccatgctcggcgtcgccaacgacgtcggcgagaacgtggggctcgtccccggggtgctcgccaaccgcctcccgccgtggctcatcctccttatcggctccgcctgcgccctgctcgggttcggcacgctctggctcgccgtcaccaagaccctcgtcatgccgtactgggtgttgtgcatagccttatgtattggcacaaacagcagcgcatggttgggcaccgctgcacttgtgaccaatatgaggaactttcctctcagccggggaactgttgctggtctgatcaagggctatgttgctgtgagtgctgctgtctacacagaaacatttaatggaatgcttcagaactctcccacaaaccttttgctgttgcttgctttggggatccccaccgcatgtgttctggtgatgtattttgttaggccttgcactccatcactggatgaggacaacgcagcagagcacagtcatttcatgttcacacagatctctagtgtggttctcggtgtatatcttatggtagctacaattctcggtgatactttaaaactaagtgacgctattacctaccttttgtttggtataatgatacttttgctcctttctccactggcaataccaataaaaatgactatttatccaaacaaaccaaaaagggaaaagactagcacccttgcactgtcttattcgactgatagtttgtctggtccggatcaagagaattcagaaccacttcttggtggcacttcaacatttgtcactggagccaacgattctgatgaggctactgatgtggatcttcttttggccgagggtgagggagccgtgaatttgaaaaagaaaagagggcctagaaggggggacgatttcacattccgagaagcattggttaaggcagacttttggctactatttattgtgtacttttgtggagttggaactggtgtcactgttctgaacaacctagctcaggttgggatggctgttggtgctgatgatactactatcttgttgtgcctcttcggcttctgcaactttgttggccgtatccttggtgggtctgtctctgaatatttcgtaaggtcaagaatgcttcctcgccctttctggatgatgtgcacacaaataatcatggtgataaccttcctccttttcgcaactggccttcatagcttgatttatgtgtcaacaacatttctgggcatatgttacggtgtccaatttgctgtcatgatcccgacagtctcagaactttttgggttgaaggactttgggttgatgtacaacttcatgttgttagtgaatcccctaggtgcattcttcttctcagctcttctcgctggttatatctatgacaaggaagcggcgaagcagcagccaggcgtgttggaaccttcaacctgccttgggcctgactgtttcaggcttaccttctacgtttgtgccatcgtttgttgctgtggaaccctagtgagtgtggttttcatagcgaggataaagccagtttatcagatgctctatgcaagcggatcgttcagacatcctcggagtcaacaactccattgatggcacgcgcatgaacacagactattttggagagaattatcagctcggtgtgtatagttggctttcttatcacttcatatcccagtgctgtattgtcctactgttgcttggtccgtccccgttggatcggagagttattttgatttcatctgtacctgttctgtaaagcttgtgatcagtagcagactagcagttaccagcatacagccggctgtcgaagggatgaaacttgggggcgcgtatacatggtggggccgttcttgtgcttgtacatcaagtttgagaatgttgtacaatatcttcttcatcccactgacgctgttaataccatgagtgcaatgagcctggttatgtgtct

SEQ ID NO: 4231 - DNA, 2427 bp, Hordeum vulgare subsp. vulgare
gtgtgccaactgagctgagcttcctctgcctcagccaaaagcaagcacggcctcctctcctccacacagtacgccacgccacgccacgccacgcctacaccctgagtgcccgaccagccacatcaatcacgcagccgtagtatcaccagctgctactatcggcaggaggagctcggcgagtgcgacgccaaggcccaagggggatcgagatggcgggcggcggagggctggggaaggtgaaggcggggagccggccgccgtgggtggggctggcggcggcggtgtgggtgcaggtggccgccgggagcgcctacgtcttcccgctctactcgcacgccgtcaaggaggcgctcgggtacaaccagaaggcgctcaccatgctgggcgtcgccaacgacgtcggcgagaacgtggggctcgtccccggggtgctcgccaaccgcctcccgccctggctcatcctcctcatcggctccgcctgcgccttcttcggcttcggcaccgtctggctcgccgtcaccaagaccgtcgccatgccctactgggtgttgtgtgtagctctatgtgtcggcacaaacagcagtgcatggttgggaactgcggcgcttgtgaccaacatgaggaactttcccctcagccgaggaaccgttgctggtctcatcaaaggttatgttgctgttagtgctgctgtctacacggaaacgttcaacggaatgcttaacaattcgcccacaaacctcttgctattgcttgctttggggatcccggtagcatgtgttgtggtgatgtattttgttaggccctgcaccccgtcactggatgaggataatgcaacagaacacagccacttcgtgttcacacaggtctctagtgtggttctcggtgtatatcttatggtggctacaatactcggcgatactttgaaactgagcgcgactatcacctaccttttgtttggtataatgatactcctgctcctttctccacttgcaataccaatcaaaatgacactttatccaagcaaaccaaaggacgagaaggccagcatccttgttccatcttattcaacagatagtttgtccggggcggatcaagagaatggagaaccgcttctgcgtggcccttcggcgacgtttgttccaggcagcaatgattctgatgagaccgatgtggatgttctgctggctgagggtgagggagcagtgaatatgaagaagagaaaaggaccaagaagaggggatgatttcacatttgctgaagccttagttaaggcagatttctggctactgtttattgtatacttttgtggtgttggcactggtgtcactgctctgaacaacctagctcagattgggacttctgttggtgctaatgacacaactgttttgttgtgcctcttcggcttctgcaactttgttggccgtatcctcggtggatctatctctgaatatttcgtaagaacaagaatgcttcctcgtcctttctggatgatgtgcacacaaataatcatggtgataaccttcctccttttcgcaaccggcctccatagcctgatatacgtgtcaacgaccctcctggggatatgctacggggtccagttcgccgtcatgataccaaccgtgtcggagcttttcgggctcaaggacttcgggctgatgtacaacttcatgctcatggtgaaccctatcggcgcgttctttttctcggccctcctcgccggttacgtctacgacaaggaggcggcgaggcagaacccgggcgtgctggaccctgcaaactgctttggacctgactgtttcaggctcacattctatgtctgtgccatggtgtgttgctgcgggaccctgatctgcctagttttcatcgcgaggatcaagccggtttatcagatgctctacgccagcgggtcgttcagacaccctcgacagcagcagctgtgctgatggattacaatggcatcaataggaaaacctggaagtatgaaaaaaaaaacagaggaaattatcagctgattgtctacagttccagctccttattgcgtcacattgcagttgcagtgctatatattgtttcagaaggttgtatgcttgattcatcccaatattggtattgaagcatatgagagagttcctttcgtttcataattcgttcctgttgtctaaggtataccagccgatcgtcgaggacagcgctggacggaaacttgggggtgtgtatatatgagcagatgttgtactgttgtaaatcaggagaccagggaggttttgagtatgctgtgcagtgatcagtatcttctgcattccccttcgtcgtaccacgagtttatgtattctatatcaatctcagcaatagcatcttgtattgtatgttctgaactctgaaggggcagcttgcagttgctagcaatacaattcttctgaatattcc

SEQ ID NO: 4232 - DNA, 4645 bp, Oryza sativa Japonica Group
ggccgccgtgggtggggctggcggcggcggtgtgggtgcaggtggcggcggggagcgcgtacgtgttcccgctctactcgcacgccatcaaggaggcgctggggtacaaccagaaggcgctcaccatgctcggcgtcgccaacgacgtcggcgagaacgtggggctcgtccccggggtgctcgccaaccgcctcccgccgtggctcatcctccttatcggctccgcctgcgccctgctcgggttcggcacgctctggctcgccgtcaccaagaccctcgtcatgccgtactgggtggtacgtagcctcccgccctcgccctttcagtgattgtgtgctcgtcttggcttttgcttgtttgcgtggggatttcttgctgtttttgcctgatttgagctcctcatcggggaggagattgagggatgatgatgaacagttttttattgagggacctaaaattttagcacatacgaagtagctctcaaattcccaattttatctttttttaaaaaaaaagcgattattgtccttttggagcgtaatttctggatatggcttggttgactgaacgaatgtcgaaggtgatgatcgactagcggcatctgtagaatgttgaaagatgtgcgagttttttaactgtatgattgacaacaacgccggtagatattttcctagaataagcgtgaaaccaaatgtggcatatgtagttctttacttcctgccattcggtagaacatgtcagactttggtccattctttaggtgaataattgttgactatttaaacaatcatgcttgcaaatggggcacaattggttccggtactgagagccacagcaaacctagaactttaatttcgcaaatctgccaactcgagctggtgacctggtgtattcgcatccctacaacttcttatatagttttaagtgttggtgacagattttggcaagttaatgccctaaagttattttcaagaagcagtaaggctgactttaatcagttcaaaattctggttttagtaaattgcataaaaatatcacatgtaaagacatttactgttcagttttacatgagttttctgttgcagcagcaacagaaaactatattatctgtgtgtgccacatatataaagattatgccataaatgaggaggtcaaaatataagtagtaaggcatgcttagtagtgctatctaggttgtctcttatgattgccatgttatatatattaaaaaaaaagtaggtggcagagaaagggggtgaagtgagagaacgtgtcatctcttatacaagagacgatatgagagaggacaccgacacacaagactgagagttctgaggtgagtatgcgattaaaagaaggggaattataatggcatttatgatagagacaaactgttagagatcatataggttgtacgtgaggttattcttgaatcttgatgagtcagatttgtaggagattacattaggggtctctttattttacatggtctaagttcgtattacttgattgaagcattggctgacacccaaatacccaatacaacatgattgagattcctgaatgtgatggttgctcaacttttggtgattttcaactttgaatagccatctgacctgcaacgcctggggatgtcattcattggtgtttgtgaccactggaaggttattgctgaagttggtatgaacacaatttttgttgggactttttccattacaaaatacattgacaatgtaaaagcaagccaaagaaaaacagtgaagttcatgcatccttagctttatacacttactggtaaacatgttctggtcttgtgttgtgtagctgtttattattattatatttgcttgtgtgttgcttttttgtgaccctgaatgtctaaactctaaaatgccagcccattctgtatatattaatgttttcacaatttagagacatacattagacctactgtattgcttttttgcattcgtatcgtattgttttagggaaaaaatgtttgttgttttgagccaagatttaatcaatccaacaagatattggtattacactgtaactttttaatcactgtaaataattttttgccaaaatgatatggaattcctagtcgacatttgatactttttttaagttcagagctcactagaatttccatagaaacaccagtcactttacaatcagtgtcttcatcttcaaaatctcagccgctgaatgaacttcttggacaaaattagtccctttttagtttcatgatcgtcctgatatgttcaacatactcaattcatgaatcaagatactccattaaccgcatagtttttccaacaaagtagaattgtctcacaaagaagccactattaaggcacttattttctttgaatgttgcaagaatttcctgtaattgtaaatgttctgaatctccaaagatccaaaaaaatcgatcatcatgtctcttttccctttttatgtactagtaaatgtaaatcaggcgagcagtacacgtgcatgctatccttatggagagatctgataaagaaaataaattatgcacacgcttagaaggcaattggttgtttaccataaatattttatctgtaatgttggcaagtacgaaaatgctgactagtgttacgtgcatagaacttttatatctgtaatgttggcaagtacgaaaatgctgactaatgttggcaagtacgaaaatgctgactagtgttaaatgctgactagcttcctaaatcatggaaccgcatcttggtaaaattctgtctcaaatgcctgatgagttgtccatatctgatatttcttgctcatgttgtagctcatactttcaagcgagtctttttatatttagcatattttgttggatgcctcttgcagttgtgcatagccttatgtattggcacaaacagcagcgcatggttgggcaccgctgcacttgtgaccaatatgaggaactttcctctcagccggggaactgttgctggtctgatcaagggctatgttgctgtgagtgctgctgtctacacagaaacatttaatggaatgcttcagaactctcccacaaaccttttgctgttgcttgctttggggatccccaccgcatgtgttctggtgatgtattttgttaggccttgcactccatcactggatgaggacaacgcagcagagcacagtcatttcatgttcacacagatctctagtgtggttctcggtgtatatcttatggtagctacaattctcggtgatactttaaaactaagtgacgctattacctaccttttgtttggtataatgatacttttgctcctttctccactggcaataccaataaaaatgactatttatccaaacaaaccaaaaagggaaaagactagcacccttgcactgtcttattcgactgatagtttgtctggtccggatcaagagaattcagaaccacttcttggtggcacttcaacatttgtcactggagccaacgattctgatgaggctactgatgtggatcttcttttggccgagggtgagggagccgtgaatttgaaaaagaaaagagggcctagaaggggggacgatttcacattccgagaagcattggttaaggcagacttttggctactatttattgtgtacttttgtggagttggaactggtgtcactgttctgaacaacctagctcaggttgggatggctgttggtgctgatgatactactatcttgttgtgcctcttcggcttctgcaactttgttggccgtatccttggtgggtctgtctctgaatatttcgtaaggtcagctccctttaaccactttgcaattactttattcattcaatttctatcattgcatagctgacatatatagcaactaacataagccaaagacataacattttctgttcttgcctactgtgatgtactgatattactccatatgaccatatgaggccaaaagccactatcacctcagcacttcctgtgaaatcctggcagactactcagatgagctggccgctgatatttatctcctgcagactggcaatcactttgcatattcctagtcatccacaatcctatgattttttctttactcttgttgttaagctacatgcttgataactattagttgctgcttctgtaaaatgattcgagtaaaacctgattgcaggtcaagaatgcttcctcgccctttctggatgatgtgcacacaaataatcatggtgataaccttcctccttttcgcaactggccttcatagcttgatttatgtgtcaacaacatttctgggcatatgttacggtgtccaatttgctgtcatgatcccgacagtctcagaactttttgggttgaaggactttgggttgatgtacaacttcatgttgttagtgaatcccctaggtgcattcttcttctcagctcttctcgctggttatatctatgacaaggaagcggcgaagcagcagccaggcgtgttggaaccttcaacctgccttgggcctgactgtttcaggcttaccttctacgtttgtgccatcgtttgttgctgtggaaccctagtgagtgtggttttcatagcgaggataaagccagtttatcagatgctctatgcaagcggatcgttcagacatcctcggagtcaacaactccat

SEQ ID NO: 4233 - DNA, 4638 bp, Oryza sativa Indica Group
cggccgccgtgggtggggctggcggcggcggtgtgggtgcaggtggcggcggggagcgcgtacgtgttcccgctctactcgcacgccatcaaggaggcgctggggtacaaccagaaggcgctcaccatgctcggcgtcgccaacgacgtcggcgagaacgtggggctcgtccccggggtgctcgccaaccgcctcccgccgtggctcatcctcctcatcggctccgcctgcgccctgctcgggttcggcacgctctggctcgccgtcaccaagaccctcgtcatgccgtactgggtggtacgtagcctcccgccctcgccctttcagtgattgtgtgctcgtcttggcttttgcttgtttgcgtggggatttcttgctgtttttgcctgatttgagctcctcatcggggaggagattgagggatgatgatgaacagttttttattgagggacctaaaattttagcacatacgaagtagctctcaaattcccaattttatctttttttttaaaaaaaagcgattattgtccttttggagcgtaatttctggatatggcttggttgactgaacgaatgtcgaaggtgatgatcgactagcggcatctgtagaatgttgaaagatgtgcgagttttttaactgtatgattgacaacaacgccggtagatattttcctagaataagcgtgaaaccaaatgtggcatatgtagttctttacttcctgccattcggtagaacatgtcagactttggtccattctttaggtgaataattgttgactatttaaacaatcatgcttgcaaatggggcacaattggttccggtactgagagccacagcaaacctagaactttaatttcgcaaatctgccaactcgagctggtgacctggtgtattcgcatccctacaacttcttatatagttttaagtgttggtgacagattttggcaagttaatgccctaaagttattttcaagaagcagtaaggctgactttaatcagttcaaaattctggttttagtaaattgcataaaaatatcacatgtaaagacatttactgttcagttttacatgagttttctgttgcagcagcaacagaaaactatattatctgtgtgtgccacatatataaagattatgccataaatgaggaggtcaaaatataagtagtaaggcatgcttagtagtgctatctaggttgtctctaatgattgccatgttatatatattaaaaaaaaaagtaggtggcagagaaagggggtgaagtgagagaacgtgtcatctcttatacaagagacgatatgagagaggacaccgacacacaagactgagagttctgaggtgagtatgcgattaaaagaaggggaattataatggcatttatgatagagacaaactgttagagatcatataggttgtacgtgaggttattcttgaatcttgatgagtcagatttgtaggagattacattaggggtctctttattttacatggtctaagttcgtattacttgattgaagcattggctgacacccaaatacccaatacaacatgactgagattcctgaatgtgatggttgctcaacttttggtgattttcaactttgaatagccatctgacctgcaacgcctggggatgtcattcattggtgtttgtgaccactggaaggttattgctgaagttggtatgaacacaatttttgttgggactttttccattacaaaatacattgacaatgtaaaagcaagccaaagaaaaacagtgaagttcatgcatccttagctttatacacttactggtaaacatgttctggtcttgtgttgtgtagctgtttattattattatatttgcttgtgtgttgcttttttgtgaccctgaatgtctaaactctaaaatgccagcccattctgtatatattaatgttttcacaatttagagacatacattagacctactgtattgcttttttgcattcgtatcgtattgttttagggaaaaaatgtttgttgttttgagccaagatttaatcaatccaacaagatattggtattacactgtaactttttaatcactgtaaataattttttgccaaaatgatatggaattcctagtcgacatttgatactttttttaagttcagagctcactagaatttccatagaaacaccagtcactttacaatcagtgtcttcatcttcaaaatctcagccgctgaatgaacttcttggacaaaattagtccctttttagtttcatgatcgtcctgatatgttcaacatactcaattcatgaatcaagatactccattaaccgcatagtttttccaacaaagtagaattgtctcacaaagaagccactattaaggcacttattttctttgaatgttgcaagaatttcctgtaattgtaaatgttctgaatctccaaagatccaaaaaaatcgatcatcatgtctcttttccctttttatgtactagtaaatgtaaatcaggcgagcagtacacgtgcatgctatccttatggtaaagaaaataaattatgcacacgcttagaaggcaattggttgtttaccataaatattttatctgtaatgttggcaagtacgaaaatgctgactagtgttacgtgcatagaacttttatatctgtaatgttggcaagtacgaaaatgctgactaatgttggcaagtacgaaaatgctgactagtgttaaatgctgactagcttcctaaatcatggaaccgcatcttggtaaaattctgtctcaaatgcctgatgagttgtccatatctgatatttcttgctcatgttgtagctcatactttcaagcgagtctttttatatttagcatattttgttggatgcctcttgcagttgtgcatagccttatgtattggcacaaacagcagcgcatggttgggcaccgctgcacttgtgaccaatatgaggaactttcctctcagccggggaactgttgctggtctgatcaagggctatgttgctgtgagtgctgctgtctacacagaaacatttaatggaatgcttcagaactctcccacaaaccttttgctgttgcttgctttggggatccccaccgcatgtgttctggtgatgtattttgttaggccttgcactccatcactggatgaggacaacgcagcagagcacagtcatttcatgttcacacagatctctagtgtggttctcggtgtatatcttatggtagctacaattctcggtgatactttaaaactaagtgacgctattacataccttttgtttggtataatgatacttttgctccttgctccactggcaataccaataaaaatgactatttatccaaacaaaccaaaaagggaaaagactagcacccttgcactgtcttattcgactgatagtttgtctggtccggatcaagagaattcagaaccacttcttggtggcacttcaacatttgtcactggagccaacgattctgatgaggctactgatgtggatcttcttttggccgagggtgagggagccgtgaatttgaaaaagaaaagagggcctagaaggggggacgatttcacattccgagaagcattggttaaggcagacttttggctactatttattgtgtacttttgtggagttggaactggtgtcactgttctgaacaacctagctcaggttgggatggctgttggtgctgatgatactactatcttgttgtgcctcttcggcttctgcaactttgttggccgtatccttggtgggtctgtctctgaatatttcgtaaggtcagctccctttaaccactttgcaattactttattcattcaatttctatcattgcatagctgacatatatagcaactaacataagccaaagacataacattttctgttcttgcctactgtgatgtactgatattactccatatgaccatatgaggccaaaagccactatcacctcagcacttcctgtgaaatcctggcagactactcagatgagctggccgctgatatttatctcctgcagactggcaatcactttgcatattcctagtcatccacaatcctatgattttttctttactcttgttgttaagctacatgcttgataactattagttgctgcttctgtaaaatgattcaagtaaaacctgattgcaggtcaagaatgcttcctcgccctttctggatgatgtgcacacaaataatcatggtgataaccttcctccttttcgcaactggccttcatagcttgatttatgtgtcaacaacatttctgggcatatgttacggtgtccaatttgctgtcatgatcccgacagtctcagaactttttgggttgaaggactttgggttgatgtacaacttcatgttgttagtgaatcccctaggtgcattcttcttctcagctcttctcgctggttatatctatgacaaggaagcggcgaagcagcagccaggcgtgttggaaccttcaacctgccttgggcctgactgtttcaggcttaccttctacgtttgtgccatcgtttgttgctgtggaaccctagtgagtgtggttttcatagcgaggataaagccagtttatcagatgctctatgcaagcggatcgttcagacatcctcggagtcaacaactccac

SEQ ID NO: 4234 - DNA, 1643 bp, Zea mays
ggcaaatgcggcgaaggcactgaagaagccacaccgccgccgctgtagcctgtaggctgtcgccacgacccacgcccgcgcgcgcgctgctgccgtgctgcggtctgctgccactgccacgcacctgacctgtcagcagcctccggaggaggcccggcccggggcagtgcggcggcatggctggtggtggtggagggccggggccggggcgggtgaaggcggggagccgcccgccgtgggtcgggctggcggcggcggtgtgggtgcaggtggctgcggggagcgcctacgtgttcccgctctactcgcacgccgtcaaggaggcgctcggctacaaccagcaggcgctcaccatgctcggcgtcggcaacgacgtcggcgagaacgtggggctcgtcccggggttgctcgccaaccgcctcccgccctggctcatcctcgtcatcggctctgcgtgcgccttcttcggcttcggcacgctctggctcgccgtgaccaagaccgtcgccatgccttattgggtgttgtggatagctttatgtattggcacgaacagcagtgcatggttgggcactgctgctcttgttaccaacatgaggaatttccctctcagccgaggcactgttgctggtctcatcaagggttatgttgctgttagtgctgctgtctacactgaaacgtttaatggaatgctaggcaattcacccacaaatcttttgatgttgcttgccttggggatcccaacagcatgtattgtggtgatgtattttgttaggccttgcactccatcactggatgaggacaactcaacagaacacagccatttcatgtacacacaaatctcaagtgtggttctcggaatataccttatggttgctacaatacttggtgatactttaaaactaagtcaggctgtcacctatctattgtttggcataatgatacttttgctccttgctccacttgcaataccaataaagatgacactttatccaaacaaacaaacaaaggaaaaggccagcacccttgctccatcttattcaactgatagtctgtctggtgcggatccagagaactcacaaccacttttgggcagtgcctcaacaacacttgctacaggtaccaatgaatctgatgacagtactgatttggatcttctattggctgagggtgagggagcagtgaatttgaagaagaaaagggggccaagaaggggggatgatttcacattccttgaagccctagtaaaggcggacttctggctactgtttgttgtttacttttgtggagttggcacaggggtcactgttctcaataacctggcgcagattggaatgtctgttggtgctaatgacacaactattttgttgtgcctctttggcttctgcaactttgctggtcgtatccttggtggatctgtctctgaatatttcgtaaggtaagctacatttaacttattcgcaacaacttaacctgtacaatttccctacaatgcatcacttactatattccagcttatttaagctgaaagctgaaagtagtaaagctgattgctttctacagtactgtgatatattgatattactaaacatcaaacaagcattattgaacattgcggttaattcccaatgccattgatctct

SEQ ID NO: 4235 - DNA, 1925 bp, Sorghum bicolor; identical to SEQ ID NO: 1088

SEQ ID NO: 4236 - DNA, 1933 bp, Hordeum vulgare subsp. vulgare
ggcgctcttccgctccaatggcgtcggcgtgcccccgcccgctcttcctctcattccccaagtcaccggcgccgccgctcgccgtccccgccaagcaccacccgtccgcctccgtctccctctccacccgcgcgcgcgccgcctcgtccagcgctgctccatccccttcgccatctcctccctcggacggcgtcggccccgcggcgccgacgcggggcgacgtgtacctggggcggcagctcgcggccgcggcaggcgcccgcacgcgcgcgccggaggaggatgccgagaggcgccgccgccgcaaggagaagcggagggccctggccaagaagacgccctccggcgtcgcctgctgctacggctgcggcgccccgcttcacaccggcgaggaggggtcccccggccacgtcgagcccgccacatacgacctgaagaagaggcacaaccaactgaagacggtgctatgcggaaggtgcaagctgctgtcacacgggcacatggtgaccgccgtcggtggccacggcggttaccccggtggcaagcagtttgtttcggcagaggagctaagggagaagctgtcatacctccgccacgagaaagcgttgatcgtgaagctggttgacatagttgacttcaacgggagtttcctggcgcgcatacgcgatttcgccggcgctaatcccatcgtgcttgtgataacaaaggttgatctccttcctagagacacagatttgaactgcattggcgattgggtcgtggagtctgttgttaggaagaaactcaatgtccttagcgtccatttgacaagttcgaagtcgttggtcggcatcactggtgttatatcagagattcagcaggaaaagaaggcccgagatgtgtatatactgggttcagcaaatgttgggaaatctgcatttattagtgcaatgctaaaaacaatggcatataaagatccagtggcagctgcagctcaaaaatacaagccaatacaatctgctgttcctggaacaaccttaggccctattcagatcgaagcatttttaggaggagggaaattatacgacacacctggagtccatcttcaccatagacaggcagcagttatccacgctgatgatctgccttctcttgcaccacaaagtcgcctaaaggggcgatgttttcctgctaatgatacagatgttggattaagcgggaatacgttgttctgggggggacttgtccgtatcgatattgttaaggctcttccacgcacacggctaacattctatggaccaaagaagctaagtattaatatggtccccaccacagaagcagatgaattttataagagagaagtaggagttacattgactcccccaaccggccaggagagagctgaaggatggtgtgggcttcagggcgttcgcgaattgcagataaaatatgaagagcttgataggcctgctagtgacattgcgatatctggactcggatggatcgcggttgaaccacttggtgtgccatctagcgaccctgatagcagcattgaggaagaaggcggcggcagtggcgagttgcatttaagagtacatgtacccaaaccagtcgaggtctttgtccgtgccccactgcccgtcggtaaagcagcatcacagtggtaccggtaccaggagctgacggaggtagaagaggagctgagacctaagtggcattactaatgttgcggttgccaaatgcctatttttggtctttgtgtatgctgctgtcgcgctggagcagctctgcgtgatccagttacagttacgccccgacattatgtttcttggatgatctgatagggagatgaattcatagttctagcttaggatcagctgatgaaaacgattcaggaaacctctagtgaaatgttgtggttacacttgttgcatatatatgaaactatttcacc

SEQ ID NO: 4237 - DNA, 2421 bp, Zea mays; identical to SEQ ID NO: 1089

SEQ ID NO: 4238 - DNA, 2268 bp, Sorghum bicolor
atggcctccagcctcgtgaatctgctgctcatggaggtggcggccatcgccagcattgtcctgctcccaatcctggttgtgctgagctcctaccgccactactcgggtcatccggcactccgcctcttcgtgtggtccgcatccactctcttcctcccgctcgtgtcctacgccgtctccgcggcggccaagtgggacgcagcgcgcgtcccgctcctccttgcctggacagtcttcctccagatcctgcgcaacaccatcgacaccgcccgctcctccacttcgaccatcaccagcagaggcggctccaacggaagcaagttccggccgtcggtcgagcagctggcgaggatggggtgggtggcgttcctcatcatcagcagtggtggtgccgccggcagcccgctcctcaccggcgtcctgctgtggctctgggtgctcagcctcctcaagctcatccacaggctcgtcgctgccgagctcgccaagaactcgttcgctgtcggcctcaactcgtacctcgtcgccgactacatgaagcaactccatgggcatggtcaggcaggccatggcggtggactagaaatattgccccctccttactttgtcaagggtgaggagaaactgcctatcaagcctaggccgcatgggtaccacattgaccacaggagtaggactactgctactgcagcagctccgccgtcattgtccacggacgacctgaacgcggggcatgggcatgtcgtcaccgtggacaggatatggtcgctttcctcctccggcgaccccctcctcgcaacctgcccgcagctcaaggacctctgcctctcttttgccctcttcaagctgcagctccggcggttcatcggctgcccgctcgccgaggccggctgccaccgtgccatggcattcgtgcaggacgggctccttgctggtagtggtggtagcccagacccagagagggtgttccgggtggtcgagaccgagctgtccttcctcgccgacttcctctactcgaagctcaccgtcttctacgccagcgggtggtggttcccggcgctcaactcaatactcgtgctcgccacgtggatcagctgcctcgcggccggcggcgccatcgtgcacgacatgatgaaccccggcacggcgctcgccgtggactaccagatcctccggaactacctgcagcaccacgacacggcgttccacgtcatcgttggcctcgacatactcgtctccgtctccttcatcgtctccatcgtgttcacggaagggtgggagatcgccaactacgtctgctccgactggatcaaggtgtccgccatctgcgagtacgcgcggcggccggcgtggcggaagtcgccgtgggcgcgtcgtaagctcagccgcctgctctggctccggcccatgcagcaatgggacgaccggttctgccaggtctccatcctgcagcttcggctctgctactgcggctgcgtctcgcggcaagtcgaccggatcttgaagaagaccgtcgcagtgcccgccgcggtgaaatccgccattgtggcgatgctcagaacaaacaagggtaggctcgggaacggcgagcggtccttgcaaggcaacggtgtcgcgggcaacctcttctgggcttgtcgtgttaaagccggcgacgacaacgccgtggacagcctatcggagcagattctcgtgtggcatctcgccacgaggctcgtcgagctcaagcgctccgagggagctcgtgcccgtggtggcaaactcgacgacgacgacgacgacgatgacacggatgcggggagcgaactcgacctgctggtggttgttgctacacggctgtcccgttactgcgcctacctggtggcgctgaagccgaccctcctgccggaccaccgcgcgtggacggaggagctctacgagggagtggtggaggaggtggtgagggtgctcgcgcgctgcgcggggccggtggtgaggtacgagcgtgccgcgacgtgcctcggcgggagcatgaacgcgacgctgaggaaggcgtccaagctcgggcggcagctggtggaggaggtcagcgacgaggcgttgttgtggaaggtgctcgccgacttctgggcggagctcattctctacctcgcgccgtcggagaacgtgacctcgcactccaagtcgctctaccacggtggcgagttcataaccgtgctgtgggcgttgctcggtcacgctggcattgttgggcgcccggaggctgacagcactgatatctcagcctag

SEQ ID NO: 4239 - DNA, 2142 bp, Oryza sativa Japonica Group
gccagcagcctcatcaacctcctcctcacggaggtggcggccatcgtcagcatcgtcctcctcgccctcctcgtcgtgctcagctcctaccgccgccgctccggccacccggcgctccgcctcttcgtctgggcggcctccacgctcttcctcccgctcgtctcctacgccgtctccgccgccgccaagtgggacgccgcgcgcgtcccgctcctcctcgcctggaccgtcttcctccagatgctgcgcaacaccatcgacaccgcccgctcgtcctcgtccacgatcggcaacggcagcggcagcagcaagttcaggccctccgtcgagcagctggcgaggatgggctgggtggcgttcctcattgtcagcagcgacggcaccgccgggagcccacagctcaccggggtgctcctgtggctgtgggtgctcagcctcgccaagctcgtccaccgcctcgttgccgccgagctcgccaagaactcgttcgccgtcggccttaacgcctacctcatctccgactacatgaagcagctgtacgggcaagaccaaggagaccacgacgtgcaagctcctccgttgttggtgatgggcgaggagaagctgcaaatcgaggcgaggccacaggggtaccgcattggccggacatcgccgccgccattgtgcgtcgacgccgggcatgtggtcaccatggaccggatatgccggctgttctcctccggcgatccactcgtcgcttctaacccgcagatcaaggacacatgcctctcgttcgccctgttcaagctgcagctccggcggttcgtcgggtgccccatcgccgaggcgggctctcgccgttcggtggcgttcgtgctcgacggcctcctcggcgagagccacgagcgggtgttccgggtgatcgagaccgagctgtccttcctcgccgacttcctctactccaagctcaccgtcttctacgcgagcgggtggtggttcccggtgctcaactcgatgctcgtgttcgccacgtgggtcagctgcctcgccgccggcggcgccatcgtgcacgacatgacgtgccacggcacgacgctcgccagcaactacgacaacctgagggagtacctgcagaaccacgacaccgtgttccacatcatcgtcggcctcgacgtgctcgtcaccgtctccttcatcgtcgccatcgtgttcacggaggggtgggagatcgctacctacgtccgctccgactggatcaaggtgtccgccatctgcgagtacgcgcgccggccgtcatggcgcaagtcgccatggactcgccgcaacgtcggccgagttctcccgctcaagccaatgcagcgctgggacgatcggttcgggcagacgtccatcctgcagctccgtccgtgctactgtggctgcgtctcccggcaggttgaccggatcgccaagtcgtcggccactgtgccggcggcggtgaagacggccgtcgtggacacgctaaggacgaaccaaggaaacctgggaaacggcgtgctctcgttgcagcggaacggcgtcgccgacaagctcgcctgggcgtgccaccacgccggcgacgagagaagcgtctccgagcagatcctggtatggcatgtggcgaccaggcttctcgagatcatgcgatcagaaggcgctcacgggagacacgacgacggagacggcgacggcggcggagacagcgacacggtggtcgtcgcgacacggctgtcgcggtactgcgcctacctggtggcgctgaagccggagctcctgccggaccacccggcctggacggaggagctgtacgagggcgtggtggaggaggtgtcgagggtgctcgcgcggttcgcaggggcggtggtgcggtacgagcgcgcggcgacgtgcctcggcgggagcacgaacgcgacgctgaggaaggcggccaagctcgggcggcagctggcggaggagctcggcggcgacgaggagttgccctggagggtgcttgccgatttctgggcggagctcgtcgtctacctcgcgccgtcggagaacgtcacggcgcattccaaggcgctccgccgtggcggcgagttcatcaccgtgctgtgggcgttgctcggccacgccggcattgttagccggccggacactgacgtc

SEQ ID NO: 4240 - DNA, 1646 bp, Zea mays; identical to SEQ ID NO: 1090

SEQ ID NO: 4241 - DNA, 1897 bp, Zea mays
cgagcggagggtcactgtcatcggcccaaattattttccacggcgatgacgagtgcatcgctcgtccgttccttcctctctcctcctcctcctttccctgctccatccagactccaactaaacgccattggtgaatggatcccaaggaggtcaaactgatgcagagcaagttggacttttcagtcagtggcctggccttgcagatcgctcccgcgaggctggccgaagaggcagggggcttgttagtagtccagtcgctgctataaaataaagcggccatgaaccgtgttctcgctctcgcgtgtgcgtcttctctgctcacatgccgcgaggtgctccaggaacaagtgccgtccaccagatccaggctcggcatgttcgtgatcgaggacaagggcggcgccatcgcgctgatgctggcgtcgctcctgttcctgggcacctggccggccgtgctcaccctgctggagcgccggggccgcctgccgcagcacacgtacctggactactccatcaccaacctcctcgcggccgtgctcatcgcgctcaccttcggccagctcggggacagcaggcgcggcatgcccaacttcttcacgcagctcggccaggacaactggccctctgtgctgttcgccatggccgggggcgtcgtgctcagcgtcggcaacctctccacccagtacgcttgggcctatgtgggcctctccgtcactgaggtcatcagctccagcatggtggtggtcataggcaccacgctgaactacttcctggacaaccgcatcaacagggcagagattctgttccctggtgtggcgtgcttcctcgtcgccgtcatccttggctccgctgtccattcctccaatgccgctgacaatgagcagaaactcggtgcctccacgaatgcctacaaactcgggacaagtggaaatgtggaaccaagcaaacaagctgtagacagagatgctcccaaagacttggaggagagtggagcctctggaatccggcaacctgacaaagctgaggcaggcactgcagagtacctcattgagcttgaagaacggcgatcaattaaggtattcggttcaaacaccttcatcgggctggggatcgtcttcttcgcgggcgtgtgcttctcgctcttctccccggcgttcaacctggccactaacgaccagtggcacacgctcagggacggcgtgccgcacctggtggtgtacaccgccttcttctacttctccatctcctgcttcgtcgtcggcgtcggactcaacgtcctgttcctctaccgccccatggccggcgtgccccgctcctccctcggggcctacctcagggactgggacggccgccagtgggcgctcctcgccggcctgctctgcggcttcggcaacggcttccagttcatgggcggccaggccgcagggtacgccgccgctgacgctgtccaggccctgccgctcgtcagcaccttctggggcgtactgctcttcggggagtaccgcaagtcgtcgcggaagacctacgtcctgctcggcttcatgctcttcatgttcgtcgccgctgtcgccgtgctcatggcttcgtcaggtcacaggagcacagagtgaattgcaagtcttgttcgtcctctgcttgttgcaagcccttccacttgcgattgatccacggaaagatccatcgtcttcgtgaagcaggggaaatccattccttccagccattaatgagatcttcagaacaatggaatggagatgtacaaaaaaatggttgttgtatgattgatcaaatgtatagaactatttatattctttccaagacaattggctgataggataggaactgttccaggggtggaaaaaatctctatctttatgaacagggtaaaagcaatgttcag

SEQ ID NO: 4242 - DNA, 1648 bp, Zea mays
ctctgctcacatgccgcgaggtgctccaggaacaagtgccgtccaccagatccaggctcggcatgttcgtgatcgaggacaagggcggcgccatcgcgctgatgctggcgtcgctcctgttcctgggcacctggccggccgtgctcaccctgctggagcgccggggccgcctgccgcagcacacgtacctggactactccatcaccaacctcctcgcggccgtgctcatcgcgctcaccttcggccagctcggggacagcaggcgcggcatgcccaacttcttcacgcagctcggccaggacaactggccctctgtgctgttcgccatggccgggggcgtcgtgctcagcgtcggcaacctctccacccagtacgcttgggcctatgtgggcctctccgtcactgaggtcatcagctccagcatggtggtggtcataggcaccacgctgaactacttcctggacaaccgcatcaacagggcagagattctgttccctggtgtggcgtgcttcctcgtcgccgtcatccttggctccgctgtccattcctccaatgcagctgacaatgagcagaaactcggtgcctccacgaatgcctacaaactcgggacaagtggaaatgtggaaccaagcaaacaagctgtagacagagatgctcccaaagacttggaggagagtggagcctctggaatccggcaacctgacaaagctgaggcaggcactgcagagtacctcattgagcttgaagaacggcgatcaattaaggtattcggttcaaacaccttcatcgggctggggatcgtcttcttcgcgggcgtgtgcttctcgctcttctccccggcgttcaacctggccactaacgaccagtggcacacgctcagggacggcgtgccgcacctggtggtgtacaccgccttcttctacttctccatctcctgcttcgtcgtcggcgtcggactcaacgtcctgttcctctaccgccccatggccggcgtgccccgctcctccctcggggcctacctcagggactgggacggccgccagtgggcgctcctcgccggcctgctctgcggcttcggcaacggcttccagttcatgggcggccaggccgcagggtacgccgccgctgacgctgtccaggccctgccgctcgtcagcaccttctggggcgtactgctcttcggggagtaccgcaagtcgtcgcggaagacctacgtcctgctcggcttcatgctcttcatgttcgtcgccgctgtcgccgtgctcatggcttcgtcaggtcacaggagcacagagtgaattgcaagtcttgttcgtcctctgcttgttgcaagcccttccacttgcgattgatccacggaaagatccatcgtcttcgtgaagcaggggaaatccattccttccagccattaatgagatcttcagaacaatggaatggagatgtacaaaaaaatggttgttgtatgattgatcaaatgtatagaactatttatattctttccaagacaattggctgataggataggaactgttccaggggtggaaaaaatctctatctttatgaacagggtaaaagcaatgttcagaaaaaagtagtttgtgcctagtatgacagattcagaatggtatcagtactcccgctgttttgg

SEQ ID NO: 4243 - DNA, 1787 bp, Zea mays
atcgctcgtccgttccttcctctctcctcctcctcctcctttccctgctccctccaaactccaactaaacgccattggtgaatggatctcaaggaggtcaaactgatgcagagcaagttggacttttcagtcagtggcctggccttgcagatggctccccgaccgcgaggctggccgacgaggcaggggcttgttagtagtccagtcgctgctataaaatagagcggccatgaaccgtgttctcgcgtgtgcgtcttctctgctcacatgccgcgaggtgctccaggaacaagtgtcgtccaccagatccaggctcggcatgttcgtgatcgaggacaagggcggcgccatcgcgctgatgctggcgtcgctcctgttcctgggcacctggccggccgtgctcaccctgctggagcgccggggccggctgccgcagcacacgtacctggactactccatcaccaacctcctcgcggccgtgctcatcgcgctcaccttcggccagctcggggacagcaggcgcggcatgcccaacttcttcacgcagctcggccaggacaactggccctccgtgctgttcgccatggcgggaggcgtcgtgctcagcgtcggcaacctctccacccagtacgcttgggcctatgtgggcctctccgtcactgaggtcatcagctccagcatggtggtggtcataggcaccacgctgaactacttcctggacaaccgcatcaacagggcagagattctgttccctggtgtggcgtgcttcctcgtagccgtcatccttggctccgctgtccattcctccaatgcagctgacaatgagcagaaactcggtgcctccacgaatgcctacaaactcgggacaagtgggactgtggaaccaagcaaacaagccgtagacagagatgctcccaaagacttggaggagagtggagcctctggaatccggcaacctgacaaagctgaggcaggcactgcagagtacctcattgagcttgaagaacggcgatcaatcaaggtattcggttcaaacaccttcatcggtctggggatcgtcttcttcgcgggcgtgtgcttctcgctcttctccccggcgttcaacctggccaccaacgaccagtggcacacgctcagggacggcgtgccgcacctggtggtgtacaccgccttcttctacttctccatctcctgcttcgtcgtcggcgtcggcctcaacgtcctgttcctgtaccgccccatggccggcgtgccccgctcctccttcggggcctacctcagggactgggacggccgccagtgggcgctcctcgccggcctgctctgcggcttcggcaacggcttccagttcatgggcggccaggccgcagggtacgccgccgctgacgctgtccaggccctgccgctcgtcagcaccttctggggcgtactgctcttcggggagtaccgcaagtcgtcgcggaagacctacgtcctgctcggcttcatgctcttcatgttcgtcgccgctgtcgccgtgctcatggcttcgtcaggtcacaggagcacagagtgaattgcaagtcgtgttcgtcctctgcttgcaagcccttcctcttgcgattgatccacggaaagatccatcgtcttcgtgaagcaggggaaatccattccttccagccattaatgagatyttcagaacaatggaatggaratgtacaaaaaaaatggttgttgtatgattgatcaaatgtatagaactatgttatattctttccaagrcaattggstgaaaaaaaaaaaaaaaa

SEQ ID NO: 4244 - DNA, 1744 bp, Oryza sativa Japonica Group
gtgccacttctttggtttcatgccaaaaggtttttgaaggcccccttgtgaattccctgttgtccatcagacaaggaggcctcaagatgtacatcatagaggacaaagggggtgccattgccctcatgctggcctccctcttcttcctggggacatggcctgcggtcctcaccctcctcgagcgccgaggccggctcccgcagcacacctacctcgactactcgatcacgaacctcctcgctgcggtcctcatcgcgctcaccttcggtcagctcggcgatagcaagcccaacatgcccaatttcttcacccagctcagtcaggataattggccttcagtgctgtttgcaatggcagggggtgttgtgctcagtatagggaacctctctactcagtatgcatgggcatatgtaggtctctcagtgactgaggtcatcagctcaagtatggttgttgtaataggcacaacactgaattatttcctggacaaccgcatcaacagagcagagattcttttccctggagtggcctgcttccttgttgcagtcattcttggctctgctgtacatgcctccaatgcagctgataatgaagaaaaactaaatggctccacaaatatctataaacttggggaaaatggaagtgtggaaccaaacaaagaagtcatagaaaaagatgctcccaaggacttggagaatggagcttctgcaaccaaatatgttgccaaagctgaagcaggaactgcggaatacttgattgagctcgaagaacggcgttcgatcaaggtgttcggatcaagcaccttcatagggcttgggatagtgttcttctcaggagtctgcttctcactcttctccccggcattcaacctcgccaccaatgaccaatggcacaccctgaaacaaggtgtaccacacctggtggtgtacaccgccttcttctacttctcgatctcgtgcttcgtcatcggcatcggcctgaacatcctgttcctctaccgtccaatggccggtgtgccgaaatcatccttcaaggcttacctgaatgactgggaaggcaggcagtgggctctcctggctggcttcctatgtggctttggcaatgggtttcagttcatgggtggtcaggctgctggctatgctgctgctgatgctgtccaggcattgccacttgtgagcacattctggggaatactcctgtttggggagtaccggaaatcgtcgcgaaagacgtatatcctgctcgggttcatgctgttcatgttcatcgtcgcggtcgcggtgctcatggcttcatcaggtcacaggagcaccaagtgattgattcaaatcctttcatctcttgccttaatttggtgtttgcaagcgcaaaccactcttgctgtcagaaaacaaagaagttcaggcagcaatgcagggggggacttcagtccaggtctccaggaagcagatcatgccaacatggaatgaaactccattcatgaaatttccatttggatggagctgtacataaggggaaaaaaggaacaaactaagatagtttgtggatttgtgattttaagtttgtgtcagattatataaatgtaatgttatccctttctctgaattctaaaagacccatttgcagatagcatagggaaatttggagttcacctgaatgataagaaagatagtaactgttttggtttcgatgctgatgttcagtgcttaaaatttgaaatggtacatgacatacgagttgtttt

SEQ ID NO: 4245 - DNA, 1732 bp, Hordeum vulgare subsp. vulgare
gctgtgcttcttctttgcttccatgccaagagttcatgcaagctttgcaggaagaaagaaaccatggtttcattcatcttgtaacttgaagtgtctcacctacatgattcctacaggcggttgaagggcccctgctgaattccctgctctccatcaaacaaggcctcaacatgttcatcatagaggacaaagggggtgccattgctatcatgtgcgcctccctctttttcctgggcacatggccagcggtgcttaccctcttggagcgccggggacggctgccgcagcacacatacctcgactactcgataacaaacctccttgcggcggtcctcatcgcgcttacctttggccagcttggggatgcaaagcacaacatgcccaattttttcactcagctcagtcaggacaactggccttcagtgttgtttgcaatggcagggggtattgtgctcagtatcgggaacctctctacacagtatgcttgggcatatgtgggtctctcggtcactgaggttatcagctcaagcatggttgttgtaataggcacgacattaaattacttcctggacaaccgaatcaacagggcagagattcttttcactggagtggcatgcttccttgttgcagtgatccttggctctgctgttcatgcttccaatgcggccgacaatgaaaagaaactcagtgaatccagaaatacctacaaaattgggacgaatggaggtacggagacaggcaaaaaagttatagacaaagatgctccgaaggacatggagaatggagcttctgcagagtattccaccaaagccgaagctggaactgcagaatacctaattgagctcgaagagcgccgttcaattaaggtatttggatcaagcacctttatagggcttgggatagttttcttttctggcatctgcttctctctcttctccccggcgatcaacctggccaccaatgaccagtggcacaccctgaaagacggtgtcccacatttggtggtctacaccgcctttttctacttctccatttcatgtttcgtcgtcggtatcgggctgaacatcttgttcctctaccgtccaatggctggcgtgcccaagtcatccttcaaggcctatctgaatgactgggaaggcaggcaatgggctcttcttgctggcttcctttgcggtttcggcaatggcttccaattcatgggtggtcaggctgctggttatgcagctgctgatgctgttcaggcattgccacttgtgagcacattttggggtatcctgctattcggggagtaccggaagtcatcgaagaaaacgtatactctgctcgtgttcatgctgctcatgtttatcgccgctgtagcaacactcatggcttcagcaggtcacaggagcacaaagtgatctgtttctgttggcttttgaacgtgcgtatgcagctgtacaggcgtgcctacgcgattcttgcttcggccggctacttgacggaacttgcgtaactagcgacacgaataaaactgatcgatggatttgatggctaaaggcccgtgtcgagcctttgctttgtattgcttttcgtttttctggtattacaatcaacacccctagggtgtcttttatacacgtccacaagggactatggagatagactaggactaggaatcctaatactactaggactcggtttggctttctttcctaagtcttcatgagcaacatgattaacatctacattc

SEQ ID NO: 4246 - DNA, 1487 bp, Zea mays; identical to SEQ ID NO: 1093

SEQ ID NO: 4247 - DNA, 1653 bp, Sorghum bicolor
agcctccctttcgttctccttcgtcccctgtcgccactctttcgccccggcgcttcgccgtccgccccgccagcgttcgcgacatcacgtcctccgtctccaaccatggccgccgaaggcgaggcgtcaatgcactacacgacggacgatgcgctctcgctcgtcggcttcggccggttccagaccctcgtgctagcttactccggactgggctgggtcgcggaggcgttcgagatcatgctgctctccttcgtggggccggccgtggaagaggattgggggatatcaggagcggagcagggcctcatcgcagacagatacggcaggaggaccggtttccttttcactgcagtggtcactgccatatttggtttgcttagcgccttctcgcccaactacgcatccttactcacccttcgctttgttgttggcctgggattgggtgctgcccatgtgctatctacttggttcatagagtttgtccctgctgccaaaagaggtacctggatggttgttttccatgtttgttggactgtgggaacaatattggaggctctgcttgcgtgggctgtcatgccagtacttgggtggaggtggttgcttgcattgtcctcagcaccatgctttggccttctcattttcttccctctaacacctgaatcaccaaggtatctttgctcgagaggtagaactatggatgctacagtcatcttggaaagaatagcaaggatgaacaaagggactctccctcctggcgtactaatttacagacatgaaaagcatgttgacaacaaccttgggacttctgagacagcacttctaattgcagaagataatgctgatattgaagaggacacaagttccaagtccagtggcattgttgcattccaggcactttggtcatatgatctgataagatcaacctttcttctgtggttcatctatcttgcaacttattttacttattatggggtaatattgctaacttctgaactaagcaatggtaggaggacgtgtgcatctgtaaaatcacatttgatgcaaccaaacagtggtaatctttatagagatgtgctggtaaccagtttggcagagttcccaggcctgctcttggctgctcttctagtcgacaggattggtcgaaaaagatctatgggagggatgcttttgatgtgtggtgctttcctggcacctctttctgtacaactaggggaaggcttagtgactacccttctattctgcgccaggacttgtatcatgggcagctttgcagttctatatgtttatacacctgagctctaccctgcatcgtctcggaacaccggtgttgggatcacttcttcccttggtcggattggcagcatagtttcacctctcgttattgttggcttgttagagagctgccgtcaaaaagaagccgtgttcatgattgacctggtgctcttccttgctggagtcacatgtgccttcttccctcgagagaccaagggatgccaaatccagtgagagtttgaaatccataattccatatggatgtatgcttgcaaattatagtacaactaccattgcagtttatcatgagcccttttgtggcctaacttaagattgctgtacagatacttttggaatatagaaaatacaaatccctttttc

SEQ ID NO: 4248 - DNA, 1676 bp, Zea mays
ctttggtgcgcccggcgcttctccgtccgttcgccggcgttcgtggcttcgcgacctccgtctgcacccatggccgctgaaggcgaggtgtcaatgcactacacgacggacgacgcgctctcgctcgtcggcttcggccgtttccagaccctcgtgctagcttactccggcctgggctggatcgcggaggcgttcgagatcatgctgctctccttcgttgggcctgccgtggaggcggattgggggatatcaggagcggagcagggcctcatcagcagcgccgtcttcgccgggatgctcatcgggtccatcgccggaggcctcatcgcggacagatacggcaggaggaccggtttccttttcactgcagtggtcactgccgtatttggtttgcttagcgccttctcgcccaactacgcatccttactcacccttcgctttgttgttggtctgggattgggtgctggccatgtgctatctacttggttcatagagtttgtccctgctgccaaaagaggtacctggatggttgttttccatgcttgttggactgtgggaacaatattggaggctcttcttgcgtgggctatcatgccagtacttggatggaggtggttgcttgcattgtcctcagcgccatgctttgttcttctcattttcttccctctaacacctgaatcaccaaggtatctttgctcgagaggtaggactatggatgctacagttatcttggaaagaatagcaaggatgaacaaagggactctccctcctggcgtactaattttcagaccagaaaagcatgttgacaacaaccttgggacttctgagacagcactgctaattgcagaagataatactggcattgaagaggacacaagttccaagtccagtggcattgtcgcatttcaggcactctggtcatatgatttgataagatcaacctttcttctatggttcatctatcttgcaaattattttacttattatggggtaatattgctaacttctgaactaagcaatgggaagaggaggtgtgcatctgtaagaacacatttgatgcaaccaaacagtggtaatctttatagagatgtgctggtgaccagtttggcagagttcccaggcctgctcttggctgctcttctagtcgacaggattggtcgaaaaagatctatgggaggcatgcttttgctgtgcggtgttttcctggcgcctctttctctacaactaggggaaggcttagtaactactcttctattctgcgcccggacttgtatcatgggcagctttgcagttctatatgtttatacacctgagctctaccctgcaccgtctcggaacaccggtgttgggatcacttcttcccttggtcggattggcagcatagtttcacctcttgttattgttggcttgttagagagctgccgtcgaaaagaagctgtgttcgtggttgacctggtgctcttccttgctggagtcgcatgcgccctcttgcctcgagagaccaagggatgccaaatccagtgagagtttggactccataattccatgtatgtatgcttgcaaattacagtacagctaccattgcattttatcatgagcccttttgtggcctaatttaagattgatgtactggtacttgtaaaatatagaaaatacaaattccttctccatggatc

SEQ ID NO: 4249 - DNA, 1836 bp, Oryza sativa Japonica Group
acagttcaacaccatccagccatccaccttccccctgagtgtagcgtgcgcggccatggcgggcggagacgccgaggaggaggaggaggaggaggaggagacctacacgacggacgacgcgctcacgcgcgccggcttcggcaggttccaggccctggtgctcgcctacgcctgcgtggggtgggtcgcggaggccatggaggtgatgctgctgtcgttcgtgggcccgtccgtgaaggctgaatggggggtgtccggcgcggcggaggggctcgtcagcagcgtcgtcttcgccgggatgctcatcggcgcctgcctcggaggcctcatctcggacagatacggcagaaggatcggttttctttccacggcagttgtcactggtatatttggtttgctcagtgccttctcccccaactacgcatccttgctcgtcctccgctttgttgttggtttgggattgggtgctggccatgtgctgtccacttggttcatagagtttgttcctgctgcaaagagaggtacctggatggtcgttttccattgctcttggactgtgggaacaatcttggaagctctgcttgcctgggctgtcatgccagtacttgggtggaggtggctgcttgcattgtcttcggccccatgttttatcctgttcattttcttccccgtaacacctgaatcaccaaggtatctatgctcagtaggaagaacaatggacgctagggtcatcttggaaaaaatagcaagaatgaacaatagctctctccctcctggcatactgacttatgcctccacaaggagaatcgacaaagtgctcgatgattctgagacagcacttctaattacagaagatggtggttctggaattgatgagcatacaagttccaagcctggtggaattactgcacttcgagaatcttggtcatatgatctaataagatcaacctttcttctttggtttgtctatcttgcaaattattttgcttactatggggtaatattgttgacctctgaactgagcaatggtcagagaaggtgtgcatcagttgggataaattttatgcaaccaaaggatgccaacctttacagagatgtgctagtgaccagtttggcagaatttccaggtctggttttggcggctctattggttgacagaattggtcggaaagtgtcactggggatcatgcttttgttgtcctgtgctttccttgcaccacttgctgtacatttgggacaaggttcagtaactactcttctattctgtgcccggacttgcatcatgggaggctttgctgttctatacgtgtatacccctgagatctatcctgcatcatctcgcaacacgggggtaggaatcacatcttcctttggccggattggcagtatagtttcacctgtggtgactgttagtttgtcagagaactgccgccagaaagaagcagtgtttttcatggacctgatgctctttctagcagcagtggcatgcgccctcatccctctagagaccaagggccggcaaatccagtgaggcagtgatgctttcttcagtttgatgtacagaatcacattacattttggtcaattggagactagggcattctttcttatccagcacatatttacacctgccaaaattcactgacattttggattcaacaaagatgtgttcacctttcatgtgcaattgcagtgttgcaacaactgaaatgcaccagctagctctcaattccatacaagggtgaagactgaaaaaggtagcagcaacaactgtattaaattttgaaactcatgaaagggttggattaaattttggattaaagtggcatgcttttc

SEQ ID NO: 4250 - DNA, 1634 bp, Sorghum bicolor; identical to SEQ ID NO: 1091

SEQ ID NO: 4251 - DNA, 1881 bp, Sorghum bicolor
atgtctccttacctgctcgccgccggcgcgcttatcgtcttcctctatgtcatcaagaaccgcaggagcagcaagctcccaccgtccccgccgtcgctaccgctgatcggccaccttcacctcatcggccgcctcgcgcaccgatccttgcacgagctgcagcttcgctatggcgacggcggcagcggtctcctcttcctgcaacttggccgcagaccgaccttggtcgtgttcactgccgccgcggccacggatctgttcaagaaccacgacctcgccttcgcctcccgcccgcgcagcgtcggaggggataagctgatgtatgggtgcagcaacgtttcgttcgcgccttacggcgagaactggcgccggggcaaaaagatcgcggtggtccacctcctctccccgcggcgcgtggagtcgttcgcgcccgtgcgggccgccgaggtagccgcgctcgtcgcacggacacgccgcgccgcggaagcaggggaggccgtgcagatgagggagctcctgtacggctacacgaacgcggtggtcacccgcgcggccaccggtgccgctggggccacagcagagaagctgaaacagctgatggggaactccgcggcgctgatggcgggcttccaacccgaagacgtgctgccggacgcaccggcgaggtttgtgagatgggcgacgggcctcgataagaagctcgaagacatggccgaggtgtgggacaagttcctgtccgagatagttgccgcacacaaggagaaggggggtggcgatgcaggggaggaggatgaggacttcttggatgtcttgcttcggctgagggaagaaggcgccgatgggctcgagctcacagacgatcgcatcaaagctactatcgaggacatgatagccgctgcaactgaaacatcatctcaaacgttggaatggaccatggcagaactcatcgccaacccgcgggtgctgggcaagctccaagacgagatagtgcgagtcgtcaacgccgatcagccggccatctgtgaacccgacctgagcagaatgggatatctgaaggcagtattcaaagaggtgcttcggctccacgcaccagcgccgctcctcgtcccgcacgaatcaacaacgcccgctgttgtgcagggctacgagatcccggccaagacggcgctcttcgtcaacgtatgggccatcggacgggaccccgctgtgtgggacgcaccggacgagttccgcccggagcggttcatgggcggcagtcgctcggtggacttcagagggaccgactaccagctcatcccgttcggcgccgggcggaggatctgccccggcatcagcttcgcggtgccggtcttggagctcgcgctcgtcagcctcctgcgtcatttcgagtgggagctccccgccggcatgcgcccggtggacctcgacatgggcgaggcaccggggcttacgacgccgcggcgggttcccctcgtcctagtccccaagtgccggacgctcgttcaggcagcgctgcagtagctgaggcctcagggaatttgttgtggctccatgggtaccgaggtttgtctatttgagaagttgtggatcaaagcaaaattcaagaacactggttaccgaaaaacaacacacacgtaagaacacgtttgagtgctcccgaattgcagaaagaaatcggtttcttgttgactgcagtacatggcatggttctccctggactagactggacagtgtggtatttcacgtttatatagtcttggcctcttgggccagaataatgagatggccataagtgacaattgggctacaccatcatctcaatgtatatatgtaatatatatcctatattttcacgattgttaatagataacgtgtatattt

SEQ ID NO: 4252 - DNA, 1881 bp, Zea mays
cgagagcagaaaacaaacaatgcctctttacctgctcgccgccggcgcgcttattgtcttcctctacgttatcaacaaccgcaggagcagcaagctcccgccgtctccgccgtcgctaccactgatcggccaccttcacctcatcggccgcctcgcgcaccgatccttgctagagctgcagcttcgctatggcggcggcggcggtctcctcttcctgcaactcgggcgtaggccgaccttggtcgtgtccactgcggccgtggccgcggatctgttcaagaaccacgacctcgccttcgcctcccgcccacgcagcgtgggaggggataagctgatgtatgggtgcagcaacgtgtcgttcgcgccttacggcgagaactggcgccggggcaagaagatcgcggtggtccacctcctctctccgcggcgcgtggaatctttcgcgcccgtacgggttgccgaggtagccgcgctcgtcgcacggacacgccgcaccgcggaggctggggaggccgtggagatgagggagctcctgtacggctacaccaacgcggtggtcacccgcgcggccaccggtgccgctggggcaacagcagagaagctgaaacagctgatggggaactccgcagcgctgatggcgggcttccaacccgaagacgtgctgccggacgcaccggcgaggtttgtgagatgggcgacgggcctcgataagaagatcgaagacatggccgaggcgtgggacaagttcctgtccgatatagtggccgcacacaaggaaaaggggtgtggcgacgcaggggaggaggctgaggacttcttggatgtcttgctccggctgcgggaagaaggcgcagatgggctcgagctcacagacgatcgcatcaaagctaccatcgaggacatgatagctgctgcaactgaaacatcatcccaaacgctggaatggaccatggccgaactcattgccaacccgcgggtgatgagcaagctccaaggcgagatagcgcgagtcgtcagcgccgatcagacgaccatcgctgaaccggacctgaacaaaatggagtacctgagggcagtgttcaaagaggtgcttcggctccacccaccagcgccgctcctcgtcccgcacgaatcaacaacgcccgcggttgtgcagggctacgagattccggccaagacggcgctcttcgtcaacgtgtgggccatcgggcgggaccctgctgtgtgggacgcaccggacgagttccgcccagagcggttcgtgggcggcagtccctcggtggacttcagagggaccgactaccagttcatcccgttcggcgccggccggaggatctgccccggcatcaacttcgcgctgccagtcttggagctcgcgctcgtcagcctcctgcaccacttcgaatgggagctccccgccggcatgcgcctggaggacctcgacatgggcgaggcgccggggctgacgacgccgcggcggattccgctcgtcctagtccccaagcgcaggacgctcgttcagacattactgcagtagcacaaggaatttgatctgcctccctgagtaccgaggtttatctattgagaagttgtggatcaaacaaaattcaagaacacagattaccttacccaaaaaaaaacgcacaagaacactcaattgcagaaagaaatcggtctcttgttgaccgcagtacttgagttcattctccctggattaagttggatagtttggtttttcacatttatagtcttgggccagaataaagagatgaatgtaaggtagcaggctagcagctatcacagtggaagattgttcatgtaatagagtaccgaacgatttagccatattaggcacgagaactgttcatactgccactcatc

SEQ ID NO: 4253 - DNA, 1729 bp, Sorghum bicolor
agcttgagcaaaatccaatgttttctttctccgcagcagtagactggtcatcagagcagaaaaaatgtctccttacctgctcgccgccggcgcgcttatcgtcttcctctacgtcatcaagaaccacaggagcagcaataagctcccaccgtccccgccgtcactaccgctgatcggccaccttcacctcatcggccgcctcgcgcaccgatccttgcacgagctgcagcttcgctatggcggcggtggcggcctcctctacctgcaactcgggcgcaggcggacctttatcgtgtccaccgctgctgcggcggcggacctgttcaggaaccacgacctcgccttcgcctcccgcccgcacagcgtgtccggcgacaagctgatgtacggctgcaacaacgtgtcgttcgcgccgtatggcggcaactggcgccggggcaagaagatcgccacggtgcacctcctctcccagcgccgcgtggagtcgttcgcgcccgtgcgggccgccgaggtggcggcgctcgtcgcacgtacccgccgtgccgcggaggcggggtcggccgccgtggagctgagggagctcctgtacggttacaccaacgcggtgatcacacgtgcggccaccggtgccgccggggcaacagccgagaggctgaaacagctgctggggaactcggcggcgctgatggtgggcttccaaccggaggacgtgctaccggatgcgccggcgaggtttgtgagatgggcgacgggccttgataagaagctcgacgacatggccgaggcgtgggataagttcctgtccgagttagtagccgcgcacaaggagaagagggatgacgacggtgcaaaggatgaggatgaggacttcttggacgtcttgcttcggctgagggaagaaggtaccgacgggctcgagctcacagaagatcgcatcaaagctatcaccaaggacatgatagccgccgcaactgaaacatcaactcaaacgctggaatggaccatggccgaactcgttgccaacccgcgggtgatgaggaagctccaggacgagatagtgcgtgtcgtgagcgacgatcagacggccattgctgaaccggacctgaacaaaatggagtacctgaaggcagtgttcaaagaggtgcttcggctgcacccaccagcgccgctcctcgtcccacacgaatcaacaacgccggcggtcgtgcagggctacgagatcccggccaagacggcgctcttcgtcaacgtgtgggccatcgggcgggaccccgctgcgtgggacacaccggacgagttccgcccggagcggttcatgggcggcagtcccccggtggacttcagagggacagattaccagctcatcccgttcggcgccggccggaggatctgccctggcatcaacttcgcgctgccggtcttggagctcgcgctcgccagcctcctgcgtcacttcgaatgggagctccccgccggcatgcgcccgggggacctcgacatgggcgaggcgccggggctgtcgacaccgcggcaggttccccttgtcctagtccccaagcgcaagacgctcgttcaggcagcactggagtagcacaagggatttgatgtgcctccatggttaccgaggttccatttctctttctgcagtatgcacaccaagatccctgtgtcctctttgtttgaacatctgaataatgtttgctttggtttctgaaaacggacagatgga

SEQ ID NO: 4254 - DNA, 1753 bp, Sorghum bicolor
tccttcatcagtactagcagtcatcactcagcagactgctgtgcagagcaggacaagatgtttcattacgtagtcgcggccgccggcgtgcttatcgtcttcctttatgccgtcaagaaacgccaaagcagcaagctcccgccgtcgcctccgtcgctgccggtgatcggtcacctccacctcatcggccgcctcgcgcaccgctccctacgcgagctgcagcttcgctacggcgggagctgtggcctcctctacctgcagctcgggcgcaggcggaccttggtcgtgtccactgccgcggcggcagcggacctgttcaggaaccacgacctcgccttcgcctcccgcccgcacagcgtgtcaggtgacaagatgatgtacggctgcaacaacgtgtccttcgcgccatatggcgggaactggcgccggggcaagaagatcgcggtggtccacctcctctccctgcgccgcgtggagtcgttcgcgcccgtgcgggccgccgaggtggcagcgctcgtcgcacatacccgccgtgctgcggaggcgggggaggctgtggagctgagggagctcctgtatggctacaccaacgcggtggtcacccgcgcggccaccggtgccgccggggcgacagcagagaggctgaaacagctgctggggaactccgcggcgctgatggtgggcttccaaccggaggatgtgctgccggacgtgccggcgaggtttgtgaggtgggcgacaggcctcgataagaagctcgatgacatggccaaggcgtgggacaagtttctgtccgagatagtggctgcgcacaaggagaagggggccggcggcggcggtgcaggggagcaggatggggacttcttggacgtcttgctgcggcttagggaagaagacaccgatggggtcgagctcacagacgatcgcatcaaaggcaccgtcgaggacatgataggcggcggaactgaaacaaccatccagacgctggaatggaccatggcagagctcatcgccaacccacgggtcacggccaaactcaagaacgagatcacgcgagtcgtcaccgctgatcagccgaccatctcggagtcggatctgaacagaatggaatacctgaaagcagttttcaaagaggtgctccggctccacgcgccgttgccgctcctcgtgccgcacgaatcgacggcacccgcggtcgtgcagggctacgagatccccgccaagaccgggctctacatcaacgtgtgggcgatcgggagggacccggcggcgtgggacgcgccggaggagttccgaccggagcggttcgtgggcagcagctccccggtggactttagagggaacgactaccagttcatcccgttcggtgccggtaggaggatctgccccggtatcaacttcgcgcttccggtcttagagctcgcagtcgccagcctcatgcgccattttgactgggagctccccgctggcatgcaattgacggacctcgacatgagcgagacgccggggctgatgacgccgcggcgggttccccttgtcgtggtccccaggacggtgcctcagccagcactgccgtaggatcacggtcgacctcggccagtgggccttgttggaaaagccagttctgtagctacctaaaatccttgtaaacagttgctcaaaaaaaaatccttgtaaatacgcaaacccccccccccccccccttttttttacaaggctaagtactctctctatcccattaaaaatattattt

SEQ ID NO: 4255 - DNA, 1940 bp, Zea mays; identical to SEQ ID NO: 1092

SEQ ID NO: 4256 - DNA, 1487 bp, Zea mays; identical to SEQ ID NO: 1093

SEQ ID NO: 4257 - DNA, 1131 bp, Sorghum bicolor
atgccccgcgccgctacgggcgcgatcgccgcggcgttcctgcgagcgcaggccccgcacatggcgccgccggcgtcgcgcatcgcgcgcgcgttccccggcctcgccaccgccgccgcgacgcgcttcgctccctcctcgttcgcgtcctcgccgcggcttgctctccacccgcgcctccgatccgcgcgctccttctacagcggcgtcgcccgtgcgtcttccggtggcggcaccgtttctggctccttgacgtcggaggaggaccagcggctgcagtccgagctcatcttcctcggcacgggcaccagtgagggcatcccgcgcgtcagttgcctcacccatcccaccaagacttgccccgtttgtagcaaggcggctgagccagggaacccgaataggaggcgcaacacctctatccttctgcgccacgccaccccgtctggcaccaccaacatcgttgttgatgccggcaagttcttctaccactcggcactccagtggttccccacgtttggtttgaggacgatcgatggtgtcattattacccattctcatgctgatgccattggagggcttgactgtcttcgtgattggacgaacaatgttcagtcatcaattccaatttatgtggcagaacgtgattatgaggtgatgaagatgacccactattatctgatcgacacaagtgtagttatacctggagcggcagtttcagcattgcaattcaacattataaaagaggaaccatttatggttcacaatcttgaggtgattcctttacctgtttggcacggtcagggttaccgctcgcttggttttcgtttcggtgatgtatgctatataagtgatgtcagtgatatacctgaagaaacatacaagcttctggaaaactgtgaacttcttataatggatgctctaagacctgatcgttcttcatcaacacactttggactaccaagggcccttgaggaagttaggaaaatcaaaccaaagaaaacactctttactggaatgatgcatttgatggaccatgagaaagtaaacagtgatcttgccaggctgatggaaacagagggtcttgatatccagcttagttatgacggtctcagcatacctgtaaggctctag

SEQ ID NO: 4258 - DNA, 1294 bp, Zea mays
cagagacccgcctccgtctctgaatcggccgctgccgctaccgccgccggcggcgacgaccatgccccgcgccgctacgggtgcgatcactgcggcgttcctgcgcgcgcaggccccgcacatggcgccgctggcatcgcgcatcgcgcgcgcgttccccggcctcgccaccgccgccgcgacgcgcttcgctccctcctcgtccgcgtcctcgccgcggcttggcctcgtcccgcgcctccgatccgcgcgctccttctccggcgcccgtgcgtctcccgttagcggcgcggtttctggctcctcgacgtcggaggagggccagcagctgcagtcggagctcatcttcctgggcacgggcaccagcgagggcatcccgcgcgtcagctgcctcacgcaccccaccaagatttgccccgtttgcaccaaggcggctgagccagggaacccgaacaggaggcgcaacacctctatccttctgcgccacgccaccccgtctggcaccacaaacatcgttgttgatgccggcaagttcttctatcactcggcactccagtggttccccacgtttggtttgaggacaatcgatggtgtcattattacccattctcatgctgatgccattggagggcttgattgtcttcgtgattggacgaacaatgttcagtcatcgatcccaatttatgtggcagaacgtgattatgaggtgatgaagatgacccactattatctcatcgacacaagtgtagttatacctggagccgcagtttcagcattgcaatttaacattataaaagaggaaccatttatggttcacaatcttgaggtgattcctttacctgtttggcacggtcagggttaccgctctcttggttttcgttttggtgatgtatgctatataagtgatgtcagtgatatacccgaagaaacatacaagcttctggaaaactgtgaacttcttataatggatgctctaagacctgatcgttcttcatcaacacacttcggactaccaagggctcttgaggaagttaggaaaatcaaaccaaagaaaacactgtttactggaatgatgcatttgatggaccatgagaaagtaaacagtgatcttgccaggctgattggaacagacggtcttgacatccagcttagctatgacggtctcaggatacctgtaaggctctagaattattattattttttggaaaaaatatttatgtattgggtgctgctaattgatgatttcagagtctctttagttcgaactgagtaaaatgatgaccagatgtaaatg

SEQ ID NO: 4259 - DNA, 1511 bp, Zea mays
attaggcccatctgtcagttgacgtgcgcctttccgattacggaaagcgttggagctttctctgccaccagacgcgcaggggcaccccgggcctacctgccagcgtcggtcagagacccgcctccgtctctgaatcggccgctgccgctgccgctaccgccgccggcggcgacgaccatgccccgcgccgctacgggtgggatcactgcggcgttcctgcgcgcgcaggccccgcacatggcgccgctggcatcgcgcatcgcgcgcgcgttccccggcctcgccaccgccgctgcgacgcgcttcgctccctcctcgtccgcgtcctcgccgcggcttggcctcgtcccgcgcctccgatccgcgcgctccttctccggcgcccgtgcgtctcccgttagcggcgcggtttctggctcctcgacgtcggaggagggccagcagctgcagtcggagctcatcttcctgggcacgggcaccagcgagggcatcccgcgcgtcagctgcctcacgcaccccaccaagatttgccccgtttgcaccaaggcggctgagccagggaacccgaacaggaggcgcaacacctctatccttctgcgccacgccaccccgtctggcaccacaaacatcgttgttgatgccggcaagttcttctatcactcggcactccagtggttccccacgtttggtttgaggacaatcgatggtgtcattattacccattctcatgctgatgccattggagggcttgattgtcttcgtgattggacgaacaatgttcagtcatcgatcccaatttatgtggcagaacgtgattatgaggtgatgaagatgacccactattatctcgtcgacacaagtgtagttatacctggagccgcagtttcagcattgcaatttaacattataaaagaggaaccatttatggttcacaatcttgaggtgattcctttacctgtttggcacggtcagggttaccgctctcttggttttcgttttggtgatgtatgctatataagtgatgtcagtgatatacccgaagaaacatacaagcttctggaaaactgtgaacttcttataatggatgctctaagacctgatcgttcttcatcaacacacttcggactaccaagggctcttgaggaagttaggaaaatcaaaccaacgaaaacactgtttactggaatgatgcatttgatggaccatgagaaagtaaacagtgatcttgccaggctgattggaacagacggtcttgacatccagcttagctatgacggtctcaggatacctgtaaggctttagaatttttattattttttgggaaaaatatttatgtattgggtgctgctaattgatgatttcagagtctctttagttcgaactgagtaaaatgatgaccagatgtaatctgatgagctctcgatgcagtgcgattttacttttcaaaaaaaaaaaaaaaaaaaaaaaaaaaaaaaaaaaaaaaaaaaaaaaaaacaaaaaaaaaaaaaaaa

SEQ ID NO: 4260 - DNA, 3647 bp, Oryza sativa Japonica Group
ggcgctgaacggacggaaaggtcggggactttctgtgcggttacgcggggcccacctgtcagcgtcgcccgtgtcgctccgtctccaaccccgccgcgcgcgacaagcgagcggccggtggccgagacgtcgtttgaccgtccccgattcgcccgccgccgccgccgccgcccgccgccacagcccgccggcgaaccgtggccgtatctctctctatcctctccggagatggccggcgcgggtgcgggtgcgggcgcgatcgccgctctcctgcgcgccgcgcacgtgccgccggcgccgcgcgcgcgctcgattcggggcctcgccgcggcgcgcgggctccctcctctcgtccgcgccacggcggcggccatcgcgccgtcatcgttctgcccttacctcccgcgcctcagctctggtgcgttgcctggcgtgaattgctgctgccgtatgacgtacatacagctcgcgcctcagctgttcgacgtaatgcctagctccttctgatgaattgctcccgtttcttccagctcgctccttctcctcctcaacatcgtgcagcgccggcgcgtccctcggtggcgcggtgtccacctcgccgtccgagcaggagaagcagcggcagcagtcggagctcatcttcctcggcacgggcaccagcgagggcatcccgcgtgtcagctgcctcaccaatccctccaagacctgcaccgtacggccaccctcttcattgcagcagcgcgatgtcgtttctatgtcatactttgtgttgattggttgctcaatgtcatttgctcactttcttctttgtcctttcctgcacgcaggtctgtaccaaggcagccgagccagggaatcggaacaggaggcgcaacacgtccatcctcctgcgccatgccacgccgtctggcacggcgaacatcctaattgacgctggcaagtaagtatgcgcctttggttgatctgggagtctgaaagtttgcttcatttctcttccattctgggttatcattcttgaattgaaaaagagtgagagagagtaatgagacaccactgtgtttttctctgcttcctctgctaggttcttctaccactctgcgctccagtggtttcctgcttatgggtattgaactgctgacgtgctccatatttgtttccgagaaatttagccttgttaaacgctagcttctgacattcagattgaggacaattgatgctgtgattattactcattctcatgcggatgcaatcggaggtttgcaaatacttttattgaagcaagcaactttattaatattgattgagacaacacaccatgctcgttttgctcttgagctttctaaaagaaataagaactcctttggtacaggccttgattgtcttcgcgattggacgaacaatgtccagcccaccatcccgatttatgtagcagaacgtgattatgaggttggtgctatgtttgtagttttgtttttgcttctctagaattgcagcctcagaaagtttcattcctaacgtagacaactgtcatgccaattgaaatgaaactcacaacttctctttatgtatgcaagattttaacaactgggccactggctcacttttctttctatgcttgtactatttgttcgctatcaggtgatgaagatgactcactactatttgattgacacaagtgtggttatacctggagctgcagtttcagcattgcaattcaacattattaaagaggaaccatttacagttcataaccttgaggtctgttgtctaaaataataatttatgtaagcaagaagtagacataaaccacacgctatcagcaataattagctcttcaatccgcaaagaaatttctttttctcaactcatttgactgcactgtaataatactttatactctatgtaggcaggtaataaaaggatacatttacttctatatccttatttttgtttactatcataacttaattaactgaccatgtctatactttgagttatttgaattccaatgttgttctgagttaaatgttagtaaatccgtcatgaacctattagttacatcctatgttctcaaaatatgttgttttggtcatgatctccggtagacacctgtgaccatcgatttgttggccaaaagtatgtaaactataaggtaagtaattttgaatgtgcctttttaaattgcatgtccaaacgaaattaatatgtttttaattatgtcagtttgcgctaagtgtactttcgagtgtaccctgtctaatttattttgctgaagatatgatttctgtatttttcaggtcattcctttgcctgtctggcatggtcagggttaccgctctcttggttttcgttttggtcgtgtatgctacataaggtagatcaaagtgcaaagctaattttttacaatatattctgttggttcaagttcaacacacatggtcttaatatctctgatgtacacagtgatgtcagtgatatacctaaagaaacctacaaacttctggaagactgtgaacttctaataatggtattgacgttataactttttctatatatatatgtgaattgttaaagcatgagattatgggattctcttgaagctgcatattttcttatgttacttagtgtttttattaactttttgtataactggatttaagcttgattttattataattatgtccaggatgctcttagacccgatcgttcttcttcaacacactttggattaccacgggtgggtagttagttctaatatatcaatcagctctagcttcttattgcttcactgtattccatggtgatatattcttcacttctgcaggcccttgaggaagttaggaaaatcaaaccaaagaaaacactgtttactggtaatcattttgaggctcgtttaatgcctttactgaattaacgctgctagacttcttcagtttaaactctatgtgcactttaacttttcatgttaatttataaaaacattaatcactctggaacagaatgcacagtttactatgagaaaaggtacattgttctattgcatgtttgagaaagcttatctgcctttctattgattggcagaatttaatctcagaaaggaaaaaaggggcaatatactaaaaaaatgatctccttagttaactgttcaataatttggtacttcatgtgcacaataagcatgatgagggtgtcctacaatcactcacgccgagcttgctgtttgttttccaatggtgtgtttgatattttctcctattgcttgtcacataaaagaagaaaatatctgtatagtaacttagatctaaatattcatgttggtcacttttcagaacctttcaatgtcagaagttaactattactattcatgttactccagtttattcagaactaaagcatcaaagttcggctacttatttcttgtttatggacatgataagaaaaggtcgtttaatttgatcgaatttcacatgatgtagcttttattgtttacatgatgttgctcttgatgacttgactgaatgatatcttcaggaatgatgcatttaatggatcacgagaaagtaaacaatgaacttgccaagttgatggagacagaggggcttgacatccagctgagctatgatggtctcagggtacctgtatggctc

SEQ ID NO: 4261 - DNA, 1493 bp, Hordeum vulgare subsp. vulgare
ggggaaacgccgggcccacttgccagcgtcgctccctcccgcccggcggacagagagggcgacaggtggccagcgtccacggagaccccgtcgttaccgactcgccggccgccgccgcaaggcagacagacgcatccgcgctctcccgatgtctggggcgaccgcagctctcctgcgcgcccaccgcgtgcccatgctgcattcgcccttcgcgtgctcgctcgccgccgcgcgctccctgggcgcgcatctccctctccgcgccccggcgcccgccgcgccgctctcctcccgcctccccctcgcgcgcctccgctccggcgcttcgccgcgcttcttctcctcctcctgcggcgcccctggcagcgctgtctcttcctcggcggcggagcacgaggagccgcgcaagtcggagctcatcttcctcggcacgggcaccagcgagggcgtcccgcgcgtcagctgcctcacccacccctccaagacctgccccgtttgcaccaaggcagcagagccggggaaccggaaccgaaggcgcaacacctccattctcctgcgccatgtcacgccgtctcgcacttctaacatcctcatcgatgctggcaagtttttctaccattccgcgctccagtggttccctgcttttgggttgagggagattgatgctgtcattattactcattctcatgctgatgcaattggaggccttgattgtcttcgtgattggacgaacaatgtccagccctccatcccaatttatgtggcaccgcgtgattatgaggtgatgaagatgacacaccactatttggtcgacacaagtacggttatacctggagctgcagtttcaacattacagttcaacattataaacgaggaaccatttaccgttcaggatcttgaggtaattcctttgcctgtatggcatggtcagggttaccgttcccttggtttccgttttggtgacatatgctacataagtgatgtcagtgatatacctgacgaaacctacaaacttctggaagactgtcaacttcttatattggatgctcttagacctgatcgttcttcttcaacacactttggattacctagggccctcgaggaagtcaggaaaatcaaaccaaagagaacactgtttaccgggatgatgcatttaatggaccatgagaaagtgaacgatgatcttgccaggctgatggaaacagaggggcttgacgtccagcttagctatgatggtctcagtatacctgtaaggctctagaacaattgggcacacgcgatatgttaatcttttgggcactgttgaacggcagttgcagattttctgtagtttcatttcagtaaaatgatcacaacatgtaatccgtcaaactcctcacgtcaagctttccttttacttatctttcttcccccacccctcctcctcaacagaggaatcatatgtactagcaaatttagtccttacatcgctgatgaaattaagtttcagcagt

SEQ ID NO: 4262 - DNA, 1620 bp, Sorghum bicolor
atggagtccggcggcggtgagattctgcccggacctgggttgctcgtcacctccaaacccggcggtggccgtggcggttggcgtgccgccctcttcatcctcggtaatcatgctgattgcaagtcttcaaaaatgcctagtccgaccgcagcgatgggattctttgagcgtattgggttcgtcggcgtgtcggccaacttgatcatgtacctcaccgggccgcttggcatgtccacggctgccgcggccgcgggcgtgaacgcgtggttcggaaccgtacaggtgctgccgatcgtcggcgcgctcgtcgctgattcacggcttggccgatatcgagcgatcctggccgcctgtgtactctatcttctgggcttcggaatgctaacggcctcatccatgctgccaaccgcgaactcgccgccgtcggcgtctcctacccggctcatcatcttctacgtcgggctctacctgctggctctggcgcaaggcttcttcgggccatgcggggaagccttcggcgccgaccagttcacgcctagcgacagcgacaaccccaccgcgcccgcgttccggagctcctacttcaactggttccacttctccatgtcctggggctacgccatcgccaccgccggcctgagctacgtcgaggacaacgccggctggaccatcggtttcggcgcgtgctggaccgcgatggtgctatgccttaccgtcttcttacttggcacgccgacgtaccatgccaaccaacccgtcgacggaggcacgatcactgctgagacagtgcagaagtgggccgcgaggttcttccgtcgaaaggacactactccaactgatgaaaggctgcttctagctccacaacgacctgaggaggagcgcggactcatagctaagctgctcccgatatggctgacgagcttagtcttcgcggtcatctactcgcaaacgtacactctgttcaccaagcaggccagcacattggacagccaccttggcacggcgacgggcctcgtcgtgccgcccgctgcgctccagtgcttcatcgacgtcaccttcatcgttatgatccccttatacgaccgcgtcatcgtgcccttcgcgaggcgcctgaccgggcacgccgcgggcatcacgatgctccagcgcatcggcgcaagcatggccacgtcctgcgtcgccatggccgtcgcggcgctcgtcgaagtcaggcggctccgcgtggccagagacgcgggcctggtcgaccagccggaggtagctctgccgatgagcctgtggtggatgattccgcagtacgttctgatgggcctcgccgcagtgctgggtatggttggtctggaggagttcttctacgaccaggtgcccggcactctccgcagcgtcgggctcgcgctgtgcctgagcatctttggcgtgggaagctacgccagcagcttgcttgtgtccctgatcgactgggcgacgagaagcaaaggcgagagctggttctccgacaatctcaaccgagggcacctcgactacttctacgggctcctggcagggctcgcggctgtagaggtagccgtgttcatgtattttgcaaatcgatacgtctacacaaacaaagccgagctgtga

SEQ ID NO: 4263 - DNA, 2089 bp, Zea mays
taacatgattttcccttgagccttggtttgcatatatagctgaactcatctccatcattgtgttttttttttttcgagaaacactcactgacggcagtaatagccagtagggcgctggaataaatactccagccgttgctgcggccattagccacgagacgaattgaagccgcaaaaggttcgacgtgctcctatcgttgcggaggcgcggcgcggggatacgaatggagtccggcggcgccggcgagcttctgtccggacctgctgggtcgcccgtcacatccaaacccggcggtgggcgtggcggttggcgtgccgccctcttcatcatcggtaatcatgcagattgcaagtctccaaatttcctagttcgtccgcaggttttcatgcttcactgtcaccgttgctgttggctgttgctatgctaccatatatatatgcagtgatggggttctttgagcgtattgggttcgtcggcgtgtcggccaacttgatcacgtacctcaccgggccactcggcatgtccacggctgccgcggccgccggcgtgaacgcgtggtccggaaccgtgcaggtgctaccgctcgtcggcgctctcgtcgctgattcgcggcttggccggtatcgagctatcctcgccgcctgcgtgctctatcttctgagcttgggaatgctaacagcctcatccatgatgctaaccgcgagctcgccgccgtcgccgtctcctgcccggctcaccctcttctatgtcgcgctctacctgctggctctggcgcagggctttttcgggccatgcggggaagccttcggagcagaccagttcacgcctagcgacatcgacgacctcagcgcgcccacactccggagctcatacttcaactggttccacttctccatgtcctggggctacgccatcgcgacggctgggctgagctacgtccaggacaacgccggctggaccttggggttcggcgcgtgctggaccgccatggtgctatgccttgtcgtcttcttacttggcacgcgaacgtaccgtgccgccaagcaacccatcgatggcgtgcaggcgtgggtcgcgagggtcttccgtcggagcggcaccactccaactgatgaaaggctgcttctagctccacaacctgagggcggactcatagctaagctgctcccgatatggttgacgagcttagtcttcgcagccatctactcgcagacgtccactctgttcaccaagcaagccagcacattggacaggcaccttggcacggagacgggtctcgtcgtgccgcccgcggcgctccagtgcttgatcgacgtcaccttcatcgtcatgatccccttatacgaccgcgtcattgtgcccttggcgaggcgcctcacagggcacgcctcgggcatcacgatgctccagcgcatcggcgccagcatggccacgtcctgtgtcgccatggccgtcgcggcgctggtggaagtcaggcggctccgcgtggccagagacgcgggcctggtcgaccggccggacgtggctctgccgatgagcctgtggtggatgattccgcagtacgttctcatgggccttgccgcggtgctgggtatggttggcctcgaggagttcttctacgaccagatgcccgacgctctccgcagcgtcggtctcgcgctgtgcctgagcatctttggggtgggaagctacgccagcagcatgcttgtgtccgtcatcgactgggcgacgagggtcaaaggggagagctggttctctgacaatctcaaccgagcccacctcgactacttctactggctcctggcagggctggcggctctggaggtagccgtcttcttgcattttgcaaatcgatacgtctacacaaaaaaagccgagctgtgaatctgcaattcttgaaactttacaagtataaaaaatacttagcttatgttaaaagaacatgatgttggattttagttgggcctggcccaattttatttaattaggacaaaaataaatcctaaggcatggacaaaatgctggtgaaataaagtgtttagtctcacacggtaaaaaaaaaaaaaaaaacgagacgctcggggtccc

SEQ ID NO: 4264 - DNA, 1196 bp, Zea mays
caatttgaaggctgcccaacccttgcgccggtaggtggtggcggtgaggatagagggttacctgaggaggcagtgatggcggccacgattcagtacaaccggagcaacccggcggtgaagcggatcctgcaggaggtcaaggagatgcagtccaacccctcacccgacttcatgtccctccccctcgaggaggacatcttcgagtggcaatttgctatccttggtccgagagacagcgagtttgagggtggaatttatcatggcaggatccagctaccttcggattatccattcaagccaccgtccttcatgctacttacgccaagtggacgctttgagattcagaagaagatttgcttgagcatatccaattaccaccctgagcactggcagccttcatggagtgtccgcacagctttggtagccttgattgccttcatgccgacgaacccaggtggggcattgggctcactggattacaaaccagaagacagacgagcacttgctataaaatcacgtgaggtgccgccgaaatttggctccccacaacgtcagaaactaattgatgagatccatgagcaaatgctcagtaaggctcctcctatcccccaaacgctgccaaatgtgccaaacgaggagctcgcacctgactcttgtgatgagcatgcagacaaggtagatgaaggtggcaacacatccaagtccatgtcaggctcgtcgagtggccatcctgtgcctgaagctgaatcgctggctgcagaaaacacgggtgaagcatcagcagttgaggttgccaaccatcaagtgcctgaagcgagccgtagagaaagcattccaagagttccttcgtctctgcagaatgctgctattgcaacccagaagccaaagcatgacaggctattgaccttggccgcacttgggttgactcttgctattatggcactagtgatcaagaagttcttaaaaatcaatggcttgggcggtttcattgagggcaagttctgagtaggattgtgcataagttggatgtacgagatgactcattcctcgtactcagcatatgctataagctatataaccccgtaagatttgtaattgtttagttatagatgaaatcaaaatggaacggtactatcaataccccattgtatatgtacactggattgaaaattgctgagtatttaagcatctgatgt

SEQ ID NO: 4265 - DNA, 1318 bp, Zea mays
gtcccacgcggcagagacctggccacgcctcacgcgcttccggccttccgctacatgtcgtctcttttcgtttctcactttctctcttcgttcccaatttgaaggctgcccaacccttgcgccggtaggtggtggcggtgaggatagagggttacctgaggaggcagtgatggcggccacgattcagtacaaccggagcaacccggcggtgaagcggatcctgcaggaggtcaaggagatgcagtccaacccctcacccgacttcatgtccctccccctcgaggaggacatcttcgagtggcaatttgctatccttggtccgagagacagcgagtttgagggtggaatttatcatggcaggatccagctaccttcggattatccattcaagccaccgtccttcatgctacttacgccaagtggacgctttgagattcagaagaagatttgcttgagcatatccaattaccaccctgagcactggcagccttcatggagtgtccgcacagctttggtagccttgattgccttcatgccgacgaacccaggtggggcattgggctcactggattacaaaccagaagacagacgagcacttgctataaaatcacgtgaggtgccgccgaaatttggctccccacaacgtcagaaactaattgatgagatccatgagcaaatgctcagtaaggctcctcctatcccccaaacgctgccaaatgtgccaaacgaggagctcgcacctgactcttgtgatgagcatgcagacaaggtagatgaaggtggcaacacatccaagtccatgtcaggctcgtcgagtggccatcctgtgcctgaagctgaatcgctggctgcagaaaacacgggtgaagcatcagcagttgaggttgccaaccatcaagtgcctgaagcgasccgtagagaaagcattccaagagttccttcgtctctgcagaatgctgctattgcaacccagaagccaaagcatgacaggctattgaccttggccgcacttgggttgactcttgctattatggcactagtgatcaagaagttcttaaaaatcaatggcttgggcggtttcattgagggcaagttctgagtaggattgtgcataagttggatgtacgagatgactcattcctcgtactcagcatatgctataagctatataaccccgtaagatttgtaattgtttagttatagatgaaatcaaaatggaacggtactatcaataccccattgtatatgtacactggattgaaaattgctgagtatttaagcatctgatgtatatattgtgccaaaaaaaaaaaaaaaa

SEQ ID NO: 4266 - DNA, 1366 bp, Oryza sativa Japonica Group
ttcctcccctctcccgattccccaattcggaggccaagcctgcaccggcaagcggcggcggcggcggcgacgaggcgagagggttcccttccgcggagccggcggagatggaggccacggcgaagtacaaccggggcaacccggcggtgaagcggatccttcaggaggtcaaggagatgcagtccaacccgtccccggacttcatggccatgcccctcgaggaggacatcttcgagtggcaatttgcgatcctggggccacgagacagtgagtttgagggaggaatctaccatggaaggatccagctgccatcggactatccgtttaagccaccatcattcatgctgctcacgccaagtggaagatttgagattcaaaagaagatttgtttgagcatatccaattaccaccctgagcactggcaaccatcatggagtgtgcgcacagctcttgtagctttgattgcattcatgccaacaccaggtggtggggcattgggttcgttggacttcaaaaaggaagatagacgggcactagctatcaaatcacgtgaaacaccaccaaagtttggctctgcagaacgccaaaaagtaattgatgagatccatgagcaaatgctcagtagggctccccctgttcctcagctgctgacaaatgaaactaatgaggagactaaccaattgcctgcatctgatgcttctgatgagcatgcacacaaggcagttggaggcgtgaacacggctgggtccaactcagactctgttaataatgaccttccaaggcctgattctgagtcagaaattgtacaacacattgttgaaggtcggacagaaggggttagcaaccattcaagggccaacttgagcagagaaaacattccaagagttgctccaacgccacagaatcctgttgttgcaatccagaagccaaagcatgacagattattgaccttggctgcatttggactcactcttgctattatggcccttgtgatcaagaagttcttcaaaatcaatggtctggccggttacattgagggcaagttttaggtaggtttgtgcatagatttgataagagctatactaccccattcggtgtctgagcggctgctatgcttaccataagttataaacccctaagaattgtaaatggctgtttagttatagacgaagttgaattggtccattggtactacccgtaccttattgtatatgcagtacacctgatgaaaatcgttctaaggtcttacatgatgtgcacaattgtatatgcggtactcatgaaaatcattacaagatattacatgatgtgcgcaactgcacgtatgttgtgcaatggccagcgatccgtttgttcttgacgggca

SEQ ID NO: 4267 - DNA, 1062 bp, Hordeum vulgare subsp. vulgare
ggccgggtaagcggcggcgagtctgcaggtttcctcgggcggagacaatggcggccgcaggcaagttcaaccggagtaacccggcggtgaagcggatcctgcaggaggtgaaggagatgcagtctaatccttcccccgatttcatggccctgcccctcgaggaggacatttttgagtggcagtttgctatcctggggcctcgagacagcgaatttgagggaggaatctaccacgggaggatccagttgccctcagactacccgttcaagccaccatccttcatgctgctcacgccaagtggaagattcgagattcagaagaagatatgcttgagcatttcaaattaccaccccgagcactggcaaccatcatggagtgtacgcacggcactagtagcattgatagctttcatgccaacaaatcctggtggggcattgggttcactggactacaagaaggaagacagacgagcactcgctatcaaatcacgtgaaacaccaccaaaattcggctccccggaacgccagagtgtaattgatgagatccatgagcaaatgctcagtaaagctccacttgttccacaactgctgacaattggctctgaagaggagactaacaagacctcacctgacacttttgatgaacatgatgtcaaggcagcaggtgtcaacacttctggctccagctctggttctgctaataatactgaccttccaaagcctgattcagagtcagaagttgcagaaaacattgtgggagctcagtccgatgtaatccccagggacaatggtccaagagttgttatagcaccacagaatcctgtcttgacaatccagaagccaaagcacgacagattgttgacattggctgcatttgggctgactcttgctatcatggccctcgtgataaagaagttcttcaaaatcaacggtctggctggttacattgagggcaagttttaggtaggtttgtgcataagttgatataagagggagcgtatgcattatgcgcctgagcggctatgttatgcttactatatcctatataaaccccaaagaaccc

SEQ ID NO: 4268 - DNA, 1546 bp, Zea mays; identical to SEQ ID NO: 1094

SEQ ID NO: 4269 - DNA, 1773 bp, Oryza sativa Japonica Group
acctctctcttcttctcccacaagtcagagaaggaaggatccaatactagaaaagggaaaaaaaaataaatcaaaatccattccccttctccttccccaaacacggtgtggtctgcacgcgactcctcccccctccgccgccgccgccgccgcagcgagaccccggcgaatggcgtcccgcatcgcctctcgcctcctccgccgctccaacgcgactctaggcctcatcaggagttattcacatgccaggaactacagcagtcaactttcagctcttattccaattggttcccagagctcaaagcttacaagaagacgctattacttgccaaatgcctctccgtaccaactctggagtaggtcatttgcatctgacaatggagaccaggttgaagctgttgtccctttcatgggtgaatctgtaactgatggaactcttgctaacttcttgaagaaacctggtgacagagttgaggctgatgagcccatagcacagattgaaactgataaggttactatagatgttgctagtccggaagctggtgttattgaaaagttcattgctagcgaaggtgatactgttactccaggcaccaaagttgctatcatatcaaagtctgcggcaccagctgaaacacatgttgctccgtctgaggattcaaccccaaaagaaacgcctccaaaagctgaggagacaaaaccaaaattagaagagaagtcaccaaaagcagaacctcccaagatgcctctgccacccaaaacctcccctacagaaccacagctccctccaaaagaacgagaacggagggtgccaatgccaaggctcaggaagcgtattgcaaaccgtttgaaggattcacaaaacacatttgcaatgctgaccacatttaatgaagttgacatgactaatttgatgaagctgcggtctgattataaggatgagtttgtcaccaagcacggtgtcaaattgggtctgatgtcctgctttgtcaaggctgctgttacagcacttcaaaaccaaccaattgtcaatgctgtcattgatggtgatgacatcatatacagagactatgttgacatcagtgttgctgttggtacttccaagggtcttgtggtgcctgttatccgagatgctgataacatgaactttgcggacattgagaaagggataaacgcccttgcaaagaaggctactgagggggcactctcaattgatgagatggcaggaggaacattcaccatctctaacggtggtgtttacggaagccttatcagcacacctatcatcaaccccccacagtctgctattcttggaatgcactccattgtacaacgccctgtggtcgtggacggcaacattctcgcgaggccaatgatgtaccttgcgctgacatatgaccacaggctgatcgacggcagagaagctgtctacttcctgcgccgcatcaaggacgtggttgaagacccacggagattgctcctcgacatataaactccgcgcgcgccaccaatcgcagcctgagagctgctttgtgctttgtctggaaaataatactgcaaatttttgactgatacaaagagttgcttttctgagaaagacgaaatttgagttgaggataccgtgagggggtctctctgacaattatagacgagagcaccaaatccgaatcttaaatcttatatatcagcgcttattccattttgggatgtagttccctaaacaatttgcttttagtttcaatgcaagagcaatagatcatgcattttttgttt

SEQ ID NO: 4270 - DNA, 1774 bp, Zea mays
aagtcagagggacattgcattggggaactacagaaaagggtccgaatcgaatccgtggtgcactgccccttcctcccccacaagccgccgccgccgccgtgaggactccggcgaatggcgtcccgcgtcgcctcgggcctcctccgccgccgcgccggcgccacactaggcctcctaaggagttatgcacatgtcagaagctacaacagtcaactttcagctttggtttctgctacatctgaatgctcaaatctgccgagaagatgctattacttacctaatccctctccataccaagtttggagtaggtcatttgcttcagacaacggagacaagtttgaggctgttgtgcccttcatgggtgaatctgtaactgatggaactcttgctaacttcttaaagaaacctggagacagagtcgaggctgatgaacctatagcgcagattgaaactgataaggtcactatagatgtcgcaagtcctgaggctggtgttattgaaaagctcattgctagtgaaggcgacacagttactccaggcactaaagttgcaatcatatccaagtctgctcaacctgctgaaacacatgttgctccatcagaggaagcaacttcaaaagaatcatctccaccaaaagttgaagataaaccaaaggtagaggaaaaagccccaaaagtagatcctcccaagatgcaagcaccaaagccaactgcaccatcaaaaacatccccttcagaaccacagctccctccaaaagaacgagagcggcgggtgccaatgccaaggctcaggaagcgtattgcaaaccgtcttaaggattctcagaacacctttgcaatgctgagtacatttaatgaagttgacatgaccaatttgatgaagcttcgttctgattataaagatgaatttgtcacaaagcatggtgtaaaattgggtcttatgtcttgctttgtcaaggctgctgtttctgcacttcaaaaccagccaattgtcaatgctgtcattgatggtgatgacatcatatacagagactacgtagacatcagtgttgctgttggcacttccaagggccttgtggttcctgttatccgagatgctgataccatgaactttgctgacattgagaaagggataaacaaccttgcaaagaaagcaactgagggggcgctctcaattgatgacatggcaggaggaacattcaccatctccaacggtggtgtctatggaagcctcctcagcacacctatcatcaaccctccacagtcgtctattctggggatgcattccattgtgcaacgccctgtggttgtgaatggtgacatccttgcgaggccaatgatgtaccttgcgctgacttacgaccacaggttgatcgatggcagagaggctgtcttcttcctgcggcgcatcaaggatgttgtcgaggaccccaggaggttgctgcttgacatataaattcatgcaccagsgctgcgctgccctgccggactgttttgtgcaattgtgcttatctggaaataatgccatggaaatttttgactgatgaaaaagaattacttcctcagaaagacgaaatctgagctgaggataccgaggtttttctctatataatcgtagaagagcaaactcaactcaacatgaggtcatgtttaattttcggatctgagatgttccattacgggatgcagttcccacaaacagtcattttatttaatatgcaagagcaatagagctgctgcatttttgtttgttggttcgaaaaaaaaaaaaaaaa

SEQ ID NO: 4271 - DNA, 1828 bp, Zea mays
cttccagttccagatcccataattgcacgcgacactacaccgcccccttccgcaagtcagagggacattgcattggggaactacagaaaagggtccgaatcgaatccgtggtgcactgccccttcctcccccacaagccgccgccgccgccgtgaggactccggcgaatggcgtcccgcgtcgcctcgggcctcctccgccgccgcgccggcgccacactaggcctcctaaggagttatgcacatgtcagaagctacaacagtcaactttcagctttggtttctgctacatctgaatgctcaaatctgccgagaagatgctattacttacctaatccctctccataccaagtttggagtaggtcatttgcttcagacaacggagacaagtttgaggctgttgtgcccttcatgggtgaatctgtaactgatgaaactcttgctaacttcttaaagaaacctggagacagagtcgaggctgatgaacctatagcgcagattgaaactgataaggtcactatagatgtcgcaagtcctgaggctggtgttattgaaaagctcattgctagtgaaggcgacacagttactccaggcactaaagttgcaatcatatccaagtctgctcaacctgctgaaacacatgttgctccatcagaggaagcaacttcaaaagaatcatctccaccaaaagttgaagataaaccaaaggtagaggaaaaagccccaaaagtagatcctcccaagatgcaagcaccaaagccaactgcaccatcaaaaacatccccttcagaaccacagctccctccaaaagaacgagagcggcgggtgccaatgccaaggctcaggaagcgtattgcaaaccgtcttaaggattctcagaacacctttgcaatgctgagtacatttaatgaagttgacatgaccaatttgatgaagcttcgttctgattataaagatgaatttgtcacaaagcatggtgtaaaattgggtcttatgtcttgctttgtcaaggctgctgtttctgcacttcaaaaccagccaattgtcaatgctgtcattgatggtgatgacatcatatacagagactacgtagacatcagtgttgctgttggcacttccaagggccttgtggttcctgttatccgagatgctgataccatgaactttgctgacattgagaaagggataaacaaccttgcaaagaaagcaactgagggggcgctctcaattgatgacatggcaggaggaacattcaccatctccaacggtggtgtctatggaagcctcctcagcacacctatcatcaaccctccacagtcgtctattctggggatgcattccattgtgcaacgccctgtggttgtgaatggtgacatccttgcgaggccaatgatgtaccttgcgctgacttacgaccacaggttgatcgatggcagagaggctgtcttcttcctgcggcgcatcaaggatgttgtcgaggaccccaggaggttgctgcttgacatataaattcatgcaccagcgctgcgctgccctgccggactgttttgtgcaattgtgcttatctggaaataatgccatggaaatttttgactgatgaaaaagaattacttcctcagaaagacgaaatctgagctgaggataccgaggtttttctctatataatcgtagaagagcaaactcaactcaacatgaggtcatgtttaattttcggatctgagatgttccattacgggatgcagttcccacaaacagtcattttatttaatatgcaagagcaatagagctgctgcatttttgtttgttggttcaaaaaaaaaaaaaaaaaa

SEQ ID NO: 4272 - DNA, 1819 bp, Zea mays
gggacattgcattggggaactacagaaaagggtccgaatcgaatccgtggtgcactgccccttcctcccccacaagccgccgccgccgccgtgaggactccggcgaatggcgtcccgcgtcgcctcgggcctcctccgccgccgcgccggcgccacactaggcctcctaaggagttatgcacatgtcagaagctacaacagtcaactttcaggttgttactttgactagccctgtttttagtattttatttcaactattgactataatacatgtgttcttctcagctttggtttctgctacatctgaatgctcaaatctgccgagatgctattacttacctaatccctctccataccaagtttggagtaggtcatttgcttcagacaacggagacaagtttgaggctgttgtgcccttcatgggtgaatctgtaactgatggaactcttgctaacttcttaaagaaacctggagacagagtcgaggctgatgaacctatagcgcagattgaaactgataaggtcactatagatgtcgcaagtcctgaggctggtgttattgaaaagctcattgctagtgaaggcgacacagttactccaggcactaaagttgcaatcatatccaagtctgctcaacctgctgaaacacatgttgctccatcagaggaagcaacttcaaaagaatcatctccaccaaaagttgaagataaaccaaaggtagaggaaaaagccccaaaagtagatcctcccaagatgcaagcaccaaagccaactgcaccatcaaaaacatccccttcagaaccacagctccctccaaaagaacgagagcggcgggtgccaatgccaaggctcaggaagcgtattgcaaaccgtcttaaggattctcagaacacctttgcaatgctgagtacatttaatgaagttgacatgaccaatttgatgaagcttcgttctgattataaagatgaatttgtcacaaagcatggtgtaaaattgggtcttatgtcttgctttgtcaaggctgctgtttctgcacttcaaaaccagccaattgtcaatgctgtcattgatggtgatgacatcatatacagagactacgtagacatcagtgttgctgttggcacttccaagggccttgtggttcctgttatccgagatgctgataccatgaactttgctgacattgagaaagggataaacaaccttgcaaagaaagcaactgagggggcgctctcaattgatgacatggcaggtggaacattcaccatctccaacggtggtgtctatggaagcctcctcagcacacctatcatcaaccctccacagtcgtctattctggggatgcattccattgtgcaacgccctgtggttgtgaatggtgacatccttgcgaggccaatgatgtaccttgcgctgacttacgaccacaggttgatcgatggcagagaggctgtcttcttcctgcggcgcatcaaggatgttgtcgaggaccccaggaggttgctgcttgacatataaattcatgcaccagcgctgcgctgccctgccggactgttttgtgcaattgtgcttatctggaaataatgccatggaaatttttgactgatgaaaaagaattacttcctcagaaagacgaaatctgagctgaggataccgaggtttttctctatataatcgtagaagagcaaactcaactcaacatgaggtcatgtttaattttcggatctgagatgttccattacgggatgcagttcccacaaacagtcattttatttaatatgcaagagcaatagagctgctgcatttttgtttgttggttc

SEQ ID NO: 4273 - DNA, 1767 bp, Hordeum vulgare subsp. vulgare
gaggagaggccgcattcccttcccttcccttccccctcctcccacctcgtcgccctcgcagatcccccacacccccctcccgcgaatggcgtcccgtctcgcgtcccgcctcctcctccgccgccccgctgccgtattaagtctcctccagagttccagacatgctagacatttcagcactcagctacttgaaggtgctccaagacttccaaaaccaacatgtgaacgctatttccttcgaaatgcttctccttatcaaatttggagtagatcatttgcttcagagaatggtgacttggttgaagctgttgtgccctttatgggtgaatctgtaactgatggaacccttgccaatttcttaaagaaacctggtgatagggttgaagcagacgaggcgatagctcagattgaaactgataaggttacaatagatgtttccagtccagaagctggggtaattgaaaagttcattgccagtgaaggtgacactgttactccaggtaccaaaattgctgtgatatctaagtctgctgctccaagtgaggcccatgttgcaccatccgaagagacctcccagaaggagacccctccaccacctcctccagagaaacctaaggtcgagcaaaaatcaccaaaagtagaatctgtgaaaacacaggcatcaaaactagcctccccctcggaacctcagctccctccaaaggaaagagagagacgggtgtcaatgccaaggcttaggaagcgcattgcaaatcgtttgaaggattctcagaacactttcgcactactgactacattcaatgaagttgacatgaccaatttgatgaagctgcggactgactacaaagatgagtttgttaagaagcatggtgtcaaattgggtctgatgtcctgctttgttaaggctgctgtttctgcgcttcaaaatcagccaattgtcaatgctgttattgatggcgatgacatcatctacagagactacattgacgttagtgttgctgttggcacttccaagggtcttgtggtgcctgttatccgtgatacagaaggaatgaacttcgcggacattgagaaggggataaacagccttgcaaagaaggcaactgagggggcattgtcaattgatgagatggcagggggaacctttacaatctcaaacggcggtgtctatggaagtcttatcagcacacctatcatcaaccctcctcagtcagcaattcttggaatgcattctattgtccaacgccccgtggttgtggatggtgacatccttgcgaggccaatgatgtaccttgcactgacatatgaccataggctgatagacggcagagaagctgtcctgtttctgcgccgtatcaaggacgtggttgaggacccacggaggttgctccttgacatatagtcccatttgtcacttctgggctaaagattgtttctcgtcgatttcggaataattgtacacaaaattttgactcatgccgtagtcgcttctccaacaattgagaattcggttgctggcctctgaattgtagaagaaacatcaacgaattcgtttcccttttctgaggtgatacttgttgggacgtactagtttcccaaacatattgtgatttacaatagcaaatggacaccctcctcaactttgttgtgccattcaacgtgataataattgtaacacgtgacgtctggttggtatcaggcaggtgctcgattttcagttccaatgtactttccacctttacaactttgaaatttctagcgtggtgc

SEQ ID NO: 4274 - DNA, 2699 bp, Oryza sativa Japonica Group
agacattatgcttcttacggagttataaacatgtcagacatttcagcactaagctacttgaaggttagaaactcaacatttgttagtttggaatcctgacaacctcttagtttgttcaaacctttattttaggtgttcatggatgctcactgccaacttggtaatgatcagagcgagcaaacttcattgtcattgtgtgcctgtgctgtaaaagttgattatttggcacatccttgctctctatggtttggaattgtcactacactttactaaattcatagttcttaacaaaaatgtggcatgtaattcatatgtagcggacgatatttcctttcaaatgcttctccttatcaaccttggactagatcatttgcttcaaagaatggtaaggtacagaaaccctatagatgatataatgtttacaaatttctaccagttaaatgcttaatcaatttttttcttcctttaaggtgacttggttgatgctgttgttcccttcatgggtgaatccataaccgatggaacccttgccaccttcttaaagagtacgcatctatctatatgcaatttgagtggtcaaacttctttgtattcacatgctatctgatacagaacctggtgatagagttgaagctgatgaacccatagctcagatcgaaactgataaggtgattctgtgcactgtttattcttgttttcaacttctaagctattgttgctatcttttgcaaaattgttttcagaaaatgaaatacccttttatttcaggttacgatggatgttgctagtccagaagctgggataattgaaaaggtaacaaagagccttcccctgatttgttatttccatatttgctaaatatgattctttagtagattacttttctaaccacatcaatgcattacagttcgttgcgagtgaaggtggcattgttactccaggtgtcaaagttgctatcatatctaagtctgctgctcaaagcaagacacatacacaatcatctgaagatacctcccagaagcatagcacaaaaccaccttctacaaaggaaaacaaggttgaggctaaaccaccaaaagtagagtccagcacaacacacgaatcaaaactaacttcctcttcagaaccacaactccctcctaaggaaagagagagacgggtaaggccatatccatcacttagttacagtacatcatgataagatatactatgttacttcatattcttgactcttgcggttgcatacattttgtcaccatcaaaatgcaggtgccaatgccaaggcttaggaagcgtatcgcaaatcgtttgaaggattctcagaacacttttgcaatgctaattacattcaatgaagttgacatgtaagtgcatcattagttggattgcttatttcttgtacgtctgcttggttaatgtaatgcataagctgctggcttttggccaatttaagataacgggaataagctattcatcctagcgcgcaataatactccaatagctatagtattggttcttgttcatgccaataagttaacgtgattattgtgtaaatgaaacatcagactactatgtttagttgaggactagcatcaatgcacctcatatatttatgtgctagaagaaacggattatcaatggagtttgaatctatatggctatttcctgcatatgttacatcacctttttatttactataactttcagtgtatacaaggataaatttgctttgtgacattcatcttgttgctttcacttttctatatctgtttcaacatcatatgtactgtgatgtaggactaacctaatgaagctactttccgattataaagatcagtttgttgagaagcatggtgtcaaattgggcttaatgtcttgctttgtgaaggtaatgtttacccctttttttcttcttcttaatataatgatacacatctctctcgcgtgttcgagaaaaaaaaaacgcaatcttatgagatacttaaaccataattgtggcaattgtgtgggttgtactaaaaacccacttgcttttgcaggctgctgtttctgcgcttcaaaaccaaccaattgttaatgctgtcattgatggtgatgacatcatctacagggagtacattgacatcagtgttgctgttggaacttccaaggtatcgccacctgtttttctttatgttgactgccctaactattattttatgcaatctgttgtaatgatgtgacatgtcatttgttttagggtcttgtggtgcttgttatccacgatatagatgcaatgaattttgctgacatagagaagggtataaacaaccttgcaaagaaggcaactgagggggcacagtccatcaacaatatggcaggagggacctttaccatctcaaatggtggtgtttatggaagccttatcagtacacctatcattaattctccacaggtgctcacttgtttttttttgctgccttgtaattttgtttgtaagttccctctaacacgagctttatctaatgtagtcatcaatcctcggaatgcattccattgttcaacgtcttgtggttgtgaatggcagtgtccttgcaaggccaatgatgtaccttgcactaatgtatgaccataggctgatcgatggtagggaagctgttctcttcttgcgccgtatcaaggatgtggttgaagatccacgaaggttgctccttgacata

SEQ ID NO: 4275 - DNA, 1814 bp, Oryza sativa Japonica Group
tctctttcttcctcctctcctcttcgtgtcttgccctccggcatcagcggcggcggagtggcggggttgcggcattgggagctgacgtggccgccggaggaggagcaaggcgcgcggcgccgccggccatgtggtgatctgggggggcttgatcccgccggagtggttcttgggctgagagtgcggcgcccatgaacggagcaagctccggcggcggcggcggcgccggtgccggcggggatgggccgttggtgtaccagcgctggaaagggaacaatgtgtttgttcttcaggggaggtttatatttggacccgatgcaagatccttgtacgtcaccatgttcctcatcatcgcgccagcgtcaatcttttgtttgttcgttgccaaagaactgatgaataacttttcttatggtctgggattaccagtaatgatttcagcagttgtgttcacggcatatgacttgagccttctacttctcacttctggtagggatccaggtataatacctcggaatgcacaccctccagaacctgaaggtttggatggcaatgcagaggttggatctaaccagactccaccaatgcgtttgccccgagtgaaggatgttgttgtcaatggaatcactgtgaagacaaaatactgtgatacctgcatgctgtaccggcctcctcgttgctcccattgctctatctgcaacaactgcgttgaacgttttgaccatcactgcccatgggttgggcaatgcataggacttaggaattacaggttcttttatatgtttgtcttctcaacaactctgctctgcctctacgtctttgggttctgctgggtatacattgttaagatcagaaactctgagcagataacaatatggaaggctatggcaaagacccctgcttctattgctctgctagtctacacatttattgccgtttggtttgttggtggcctctctgtatttcacttgtatctcatgagcaccaaccagacaacatatgagaacttcaggtatcggtatgatcaacgggccaacccatacaacaggggagtcatggagaacattaaagatatattcttctctgcaattcctgcctccaagaacaacttccgcgccagagtcccagttccacaggagcaaggtctgaggcctcgcccaaccaatggtttcatgagtccaaacatggggagagccgtcggtgacattgagatgggtagaaagccggtggcatgggatgagccaaggatggcagccgatatcggcgatctgggagcaggcctgggcaacttgttggaggacaaggatggcaggtttcgcagtgcatctccagatctaagccgtgacgccctcgcaatcggaggcctggatgatcaaggatcctcagtgatgaacccagggcgtacaagctggggagttgaggcaggtcgatgatgacaatgtttagttgcccatgtatgcagttatagtggaagactcagggatttttagtgccggcttgttgctaatttggtgtttgggttgagatttgaggtcactgatgttcttaggcctatgaccttgggtggttgttttcacatttccatttctccttttaattttctgttcctccttattgtcccttgtatttcctgtatcagtggtttgaagcagttggttggttgtgaggtatccagattagttcagttctaattgtgtatgtatatagctagagcactgaacttaaagggattgttttacttggctttgatgaatgattgtgaacaagattgtattttgcagtggacaaacgccactcacttgagctgccattcc

SEQ ID NO: 4276 - DNA, 1792 bp, Oryza sativa Japonica Group
gggaggtttatatttggacccgatgcaagatccttgtacgtcaccatgttcctcatcatcgcgccagcgtcaatcttttgtttgttcgttgccaaagaactgatgaataacttttcttatggtctgggattaccagtaatgatttcagcagttgtgttcacggcatatgtaagtatcactgtcaaccttttcaatttaccttcttcattggtttccacaaatgtgttgcaattagtatatgtgatttttgggataggttgtaattgaataggacatgtacataattgtctttgtttggtaaacagaaaagtgtataagtgtatatatgtatacattcagacttaccactttaggaatttctggcatatttcaggacttgagccttctacttctcacttctggtagggatccaggtataatacctcggaatgcacaccctccagaacctgaaggtttggatggcaatgcagaggttggatctaaccagactccaccaatgcgtttgccccgagtgaaggatgttgttgtcaatggaatcactgtgaagacaaaatactgtgatacctgcatgctgtaccggcctcctcgttgctcccattgctctatctgcaacaactgcgttgaacgttttgaccatcactgcccatgggttgggcaatgcataggacttgtaagttcatacatatgcaaatctgataaaattccctacttacataaactgtatgtactgatgtgttagccgtttcagtccatgaggagtttatctgcttattcatcctaatgaccttcctatggttattttcgtgtaatcatgcatgcatgcatcattatcttttattgtgctttccatttgctatttttattatcttgcttatgctgaaattatcctctgttagctatttcatattgtggtaacatagagcatctctgcagttccaaaattctcgctttctaagtctcctgtttttactatagattttgaaatgcttcaacatgcttataaatttgcatatgactgtgcagaggaattacaggttcttttatatgtttgtcttctcaacaactctgctctgcctctacgtctttgggttctgctgggtatacattgttaagatcagaaactctgagcagataacaatatggaaggctatggcaaagacccctgcttctattgctctgctagtctacacatttattgccgtttggtttgttggtggcctctctgtatttcacttgtatctcatgagcaccaaccaggtaaatactgtttcctgaaactgcaagcatatattcctagtcttgcatggtgtatgtattcagttaattgtttaccttttcctctgcttctgtagacaacatatgagaacttcaggtatcggtatgatcaacgggccaacccatacaacaggggagtcatggagaacattaaagatatattcttctctgcaattcctgcctccaagaacaacttccgcgccagagtcccagttccacaggagcaaggtctgaggcctcgcccaaccaatggtttcatgagtccaaacatggggagagccgtcggtgacattgagatgggtagaaagccggtggcatgggatgagccaaggatggcagccgatatcggcgatctgggagcaggcctgggcaacttgttggaggacaaggatggcaggtttcgcagtgcatctccagatctaagccgtgacgccctcgcaatcggaggcctggatgatcaaggatcctcagtgatgaacccagggcgtacaagctggggagttgaggcaggtcgatg

SEQ ID NO: 4277 - DNA, 1799 bp, Zea mays
ccatttggtctcatatcttcttctcgtccgtctcgcttctctctctctctccctgaggcgcagcggtggggtggggtggggtagggggcggcattgcgagctcacaccacctgcggcgcggcgatcccgggccaccggctatcgggctatgtgatgatccgggccgtgatctcgacggctattcgcggctgaacgggcggcggcgatgaacggagcgagcgccggcgccggcggggaggcgccgctggtgtacaaggcctggaaggggaacaatgtgtttctactgaaggggaggttcatatttggccctgatgcaagatccctgtttatcaccatgttccttattgtcgcgccggtatcaattttctgcgcgttcgttgccaaggaattgatggataagttctcttatggtctgggattgccggttatgattgcagcagttctattcacagcatatgatctgagtcttctgcttctaacttctgggagagatccagggatcatacctcgcaatgcacatcctccagaacccgaagggtttgatggcaatgcagaggttggggctaaccagactccacccgtgcgtttgccccgagtgaaggatgttgttgtcaacggaatcactgtgaagacaaaatactgtgacacttgcatgttgtacaggcctcctcgttgctcccattgctctatctgcaacaactgcgtagaacgttttgaccatcactgcccctgggttggacaatgcataggacttaggaattacaggttcttctatatgtttgtattctcaacaactttgctctgcctgtatgtctttgggttctgctgggtgttcattattaagatcagaaatgccgagcagataacaatttggaaggcaatgacaaagacccctgcatctattgccttaatcatctacacattcattgcagtttggtttgttggtggcctctctgtgttccatctgtatctcatgagcacaaatcagacaacatatgagaacttcaggtatcgctatgatcagcgagacaacccatacaacaagggagtcatggaaaacatcaaagagatcttctttacaacgatccctccttccaagaacaacttctgtggtagggtcgaacaggagcatggtctgaggccccgtccaacgaatggtttcatgagtccaaacatggggagagctgttggcgacattgagatgggtagaaaaccagtggcttgggatgagcctaggatggcggctgaaattggtgatttaggagcaggtctgagcaacctgttggaggacaaggatggcaggtttcgtaccacatctccagatctcagccgcgacgcccttgcggttggaggaggcttagaagagcacggatcctcggcgatgaaccctgggcgctcaagctggggagttgaagcaggtcgatgatggcaatggcattgaccatgtaaggcggatgtagtgagatgctcagggttgttagtgccagttcgtcgctaatttgttgttttgttggagatttgaggtcactaatgttattagactttgacctgtatggttgtttctgaactttcttttcttcttcctcttaatttggggcgtcttccatgtccattgtttgaagcagtcggtttgtgacgtctccagcttggtagtgtcaggttttgtctgtatataatcggagcagtaagcctaaaataggtttcggttgcttgggtttggatggtaatggttgtgaacaatgtcgaaccttcgctttggagtaaatgaacatcgtttgatcgaaaaaaaaaaaaaaaaa

SEQ ID NO: 4278 - DNA, 1640 bp, Hordeum vulgare subsp. vulgare
gccatttgctctctctctctttcggtgtgtcaggtgtctctctctgggctcccgacatcggcggcgccgcggcggcgggcgggcattgggagctcacggcgcccagcagcggccggcggagcgggcgcgggagcaagggagggagctgtccgggggccatgccgcgatccggggcgtgatcccgccgggggattgctggcccgggagggcccgcggcgatgaacgggccgagcgccggcgccggctccggcggcgaggggaagctggtgtaccaggcctggaaagggaacaatgtgtttttcctccaggggaggtttatatttgggcctgatgcgagatccttgtttgtcaccatgttcctcattatcgctccagtaacagtcttctgtgtgttcgtcgcgaaagaattgatgaatggcttctcttatggcctggggttaccggtgatggttgtggcagttgtattcacggcatatgatttgagtcttctatttctcacttctgggagggatccaggaatcatacctcgaaatgcacatcctccagaacctgagggttttgaaggcaatgctgaagttggagctaaccagactccaccattgcggttgccccgagtgaaggatgtcgttgtgaatggaatcactgtgaagacaaagtactgtgacacctgtatgctgtaccgtcctcctcgatgctcccattgctctatctgcaacaactgtgtcgagcgatttgaccatcactgcccatgggttgggcagtgcataggacttcggaattacaggttcttctatatgtttgtcttctcaacgactcttctctgcctctatgtctttggattctcctgggtgtacattattaagatcagagatgcggagcagataacaatatggaaggcaatggcaaagacccctgcgtcgatcgctctggttgtatacacatttatcgcggtttggtttgttggtggcctctcagtgtttcacttgtatctcatgagcactaaccagacaacctatgagaacttcaggtatcgctatgaccaacgggccaacccatacaacaggggtgttgtggagaacatcaaggagatcttcttcacgccaatccctgcttccaggaatgacttcggtgccagggttccacaggagcagggcctgaggcctcgctcgacgaacggtttcatgagcccaaacatggggagagctgtgggcgacatcgagatgggcagaaagcccgtggcatgggacgagccaaggatggcagccgagataggcgacctgggaggtctgggcaacttgctggaggacaaggatggcaggttccgcaacacatcccctgatctaagccgcgatgccctcgtggtcggaggcttggacgagcaaggctcctcggtgatgaacccacctcggacgagctggggagtcgaagcgggcagatgatggtaaggtaattggtcaattcggccatgtaagcagctatagtggaggactaaggggtgtatgttagtgccagcttattcctagtttggtgtcgggttgaaactcgcggtcgctgatgttgttattaggcctatgacctggttgttgttttgctttgcatttcatgtatcagtggatttaaagcagattgttggcgtgtgt

SEQ ID NO: 4279 - DNA, 1657 bp, Sorghum bicolor
gcgagctcacgccacctgcggcgcggcgatctcgggaggttgctgtgccgccccggctatgtagtgatctgggccgtgatctcgacggctattcgcggctgagcgggcggcggcgatgaacggagcgagcgccagcgctggcgtcggcaccggcgccggcgctgctggggaggcgccgctggtgtacaaggcctggaagggtaacaatgtgtttttactgaaggggaggttcatatttggtcctgatgcaagatccttgtttgtcaccatgttccttattatcgcgccagcatcaatcttctgtgcattcgttgcgaagggattgatggataggttctcttatgccctgggattgccggttatgattgcagcagttctattcacagcatatgatctgagtcttctgcttctaacttctgggagagatccggggatcatacctcgcaatgcacatcctccagaacctgaaggttttgatggcaatgcagaggttggggctaaccagactccacctgtgcgtttgccccgagtgaaggatgttgttgtcaatgggatcactgtgaagacaaaatactgtgacacttgcatgttgtacaggcctcctcgctgctctcattgctctatctgcaacaactgtgtggagcgttttgaccatcactgtccatgggttggacaatgcataggacttaggaattacaggttcttctatatgtttgtattctcaacaactctgctctgcctgtatgtctttgggttctgctgggtgctcattgttaagatcagaaatgcagagcagattacaatttggaaggcaatggcaaagacccctgcatctattgctttagtcatctacacattcattgcggtttggtttgttggtggcctctctgtgttccatttgtatctcatgagcacaaatcagaaaacatcaaagagatcttctttacaacaatccctccttccaagaacaacttctgtggtagggtccacaggagcatggtctgaggcctcgtccacaaatggtttcatgagtccaaacatggggagagctgttggcgacattgagatgggtagaaaaccagtggcatgggatgagcctaggatggcagctgagattggtgatttaggagcaggtctgagcaacttgttggaggacaaggatggcaggtttcgtagcgcatctccagatctcagccgtgacgcccttgcagttggaggaggcttagaagagcaaggctcctcggcgatgaaccctgggcgttcaagctggggagttgaagcaggtcgatgatggcattgaccatgtaagcgactgtagtgagatgctcagggtggttagtgccagttcgtcgctaatttgttgttttgtttgggatttgtggtcactaatgttattagactcatgacctgtatggcggttgtttctggactttcttttcttctttctcttaatttgcgatgtctttcatgtctattttttgaagcagttggtttgtgatgtctccagtttggcactgtcaggtttcgtctgtatataatcggagcagtaagcctaaaataggtttcagttgcttggatttggatggtattcgttgtgaacaatgttgaatctttgcattgcagtaaatgaacatcgcatgatctgagtgcccatgtt

SEQ ID NO: 4280 - DNA, 3082 bp, Oryza sativa Japonica Group
ggcctcttcgcaaatcgcaattcccaccaccaccaccaccaccaccatcgccaccgcctactcctcctcctcccagatccacccggccgccgccgccgccgccgccgccccccacgccccgcggcggcgagatccctcccccgtcgccccaccctggattccgtcgagaagatcgtcgaggacttcgccatggacctcgccatcaaccccttctcctccggcacccgcctccgggacatgatacgggcgatacgcgcgtgcaagacggcggcggaggagcgggcggtggtgcggcgggagtgcgcggcgatacgggcggccatcagcgagggggaccaggactaccgccaccggaacatggccaagctcatgttcatccacatgctcgggtaccccacccacttcggccagatggagtgcctcaagctcatcgccgccgcgggcttccccgagaagcgcatcgggtacctcggcctcatgctgctgctcgacgagcggcaggaggtgctcatgctcgtcaccaactcgctcaagcaagatcttaaccactcgaaccagttcattgtggggcttgcactctgtgctcttggcaacatttgctccgctgaaatggcgcgtgatctgtcacctgaggtggagaggctattgcaaagtagggaaccaaataccaagaagaaggctgccttatgctctataaggatcgtacggaaggttccagatttggcagagaacttcatgggctctgctgtttcactactgaaggaaaaacatcacggggttctcatatctgctgttcagctctgcgcagaactttgtaaagcaagcaaagaggcattggagtacctgaggaagaactgccttgatggtttggtcagaatactgagagatgtgtccaatagttcatatgctcctgaatatgacattgctggaattacggatccgttcttgcatatcagagtgcttaagctcatgcgaattttgggtcaaggagatgcagattgcagtgagtttgtgaatgatattcttgctcaggttgcaacaaaaactgagtcaaataagaacgcaggaaatgctattttatatgaatgtgttgagactataatgggcatcgaagctactagtggtttacgtgtgctggcaatcaatatcttgggtagatttctgtccaaccgtgataataacatcagatatgttgctctgaacatgcttatgaaggccatggaggtagacacgcaagcagtgcagaggcatagagcaacaatattagagtgtgtcaaggatgctgatgtatctattcgcaaaagggcccttgaacttgtttaccttcttgtcaacgatgcaaatgcaaaatctttgaccaaggagcttgttgattacctggaagtaagtgatcaggacttcaaggacgacctcacagcaaagatatgctcaattgttgaaaagttttcccaagataaactttggtacttagaccagatgttcaaggttttatctctggctggaaattatgtgaaggacgatgtatggcatgctctaatagtcttaataagcaatgcatctgaactccaaggatactcagtgagatcattatacaaggcattgctagcttgcggtgaacaggaaagtttggttagggtagctgtatggtgcattggtgagtatggtgaaatgctggtgaacaatgttggtatgctggacatagaggaaccaatcacggtaacagaatctgatgccgtggatgctgtagaggtctctcttaaacgatactctgcagacgtgacaactcgggctatgtgtctagtatctctcttgaagctctcttcccgattcccaccgacttcagagaggataaaggaaatagttgcacagaataaagggaatactgtgcttgaactacaacagaggtcaattgaattcaactccattatacagaggcatcagtctataaaatcatctttgcttgagcggatgcctgtgatagatgaagctagttacttggctaagagagctgcttccacacaagcaactatttcatcagataaattagctgctgcagcaactcctggaagctcgcttaagcttccaaatggtgtagcaaagccaccaccggctcctctagctgatttgcttgatttaagttctgacgatgctcctgcgactacttccgcccctactacagcacctaatgatttcctacaggatcttttgggcataggcttgactgatacatctacagcaggtggagctccatcagcaagcacagatattctgatggatcttctatcaattggttcttctccagtacaaaatggcccaccaacagtatcaaactttagccttcctggtcaagctgagactaaagttgcacctgttacaccccaagttgtggatcttcttgatggtttgtcctcaagcacatctctttctgatgagaatacagcttacccgccaatcacagctttccagagtgcagctttgaagatcactttcaattttaagaagcagtctggaaaacctcaggagactacaattcatgctagctttacaaatttgacatctaatacattcacggatttcatctttcaggcagctgtaccaaagtttatccagttgcgtttggaccccgctagcagcaacacgcttcctgccagtggaaatgattctgttacacaaagcctcagtgtcacaaataaccaacatggacagaaaccccttgcgatgcgtatccggataacttacaaagtgaacggtgaggacaggctggagcaagggcaaatcaacaattttcctgctggattgtagtttgacctgtgtctataatgttgtgatagctcttccaactgctgcaagcaaaggcgagtttttctttttacttttttctgctcttccccttttgcttgccttctagtgagttatgtacacgacttagctggttttggccattcattcttcctttctatattgtatagtagccggcagcaattaatgctacatcttcagttttggcaaaatgtattcatatggtgctgtatatcacttgaggataactaaaattttcagcctccccctcatttcaggcagc

SEQ ID NO: 4281 - DNA, 3043 bp, Hordeum vulgare subsp. vulgare
ggcaccaccaccgcccacgtccagatccacccggccgtcgccgtggtcttcctcctccgccccgccccccgacggcgagaccccccttcccatcggactccgtcgagaagatcgtcgaggacgccgccatggacctctccctcaaccccttctcctccggcacgcgcctccgggacatgatacgcgcgatacgcgcctccaagacggccgccgaggagcgcgcggtggtgcggcgggagtgcgcggccatcagggccgccatcagcgagaacgaccaggactaccggcaccgcaacatggccaagctcatgttcatccacatgctcggctaccccacgcatttcggccagatggagtgcctcaagctcatcgccgcctcggggttccccgagaagcgcatcggctacctcggcctcacgctgctgctcgacgagcggcaggaggtcctcatgctcgtcaccaactccctcaagcaagatcttaaccactccaaccagttcatcgtgggccttgcgctctgcgccctggggaacatttgctccgctgaaatggcgcgcgacctggcgcccgaggtggagaggctgttgcaaactagggacccaaacacgaagaagaaggctgccttgtgctctatacggattgtaagaaaagttccagatttggcagagaacttcatgggttctgctgcatcattactcaaggaaaaacaccatggggttctgatttcggttgtccagctctgtacagagctctgtaaatcaagcagagaagcattggagtacttgagaaagcactccgtcgaagggttggtccggatactgagagacgtgtccaacagttcgtatgctcctgaatatgacattgctggcatcacagatccattcttgcacatccgagttcttagactcatgcggacattgggtcaaggggatgcagactgcagcgagtatgtgaatgatattcttgcccaggttgcaacgaaaacagagtcaaacaaaaatgctggaaacgctattctatatgaatgtgttgagaccataatgggaattgaagctactagtggtctgcgtgtgctggcaattaatattttgggtagattcttatccaaccgtgataacaatataagatatgttgctctgaatatgctaatgaaggccatggcaatggacacactagcagtgcagaggcacagggtaacaatattggagtgtgtcaaggatgcagatgtctccattcgcaaaagggcccttgaacttgtttacctactcgtcaatgacacgaatgtgaagcctttgactaaggagcttattgattacctagaagtaagtgatgatgacttcaaggaagacctcacagcaaaaatatgctcaatagttgaaaagttttctcaagataagctatggtacttagaccagatgttcaaggttttaacgctgactggaaactttgtgaaggatgatgtatggcatgctcttatagttctgataagcaatgcgtctgaacttcaaggatactcggttagatcattatacaaagcattgcaagcatgtggtacacaggaaagcttagttcgggtagctgtttggtgcattggtgaatatggtgagatgctggtcaacaatattagtatgctggatgtggaggaaccaatcacggtaacagaatctgatgctgtggatgctctagagctagctcttaagcgctactccgtggatgttacaacacgggctatgtgtctcgttgctcttttgaagctttcctcacgatttccgtcaacttcaaagaggatacaagtaattgttgtgcagaataaagggaatactgtgcttgagctgcagcaaagatcaatcgaatttaattccattatacaaaggcatcagtctataaaatcatctttgcttgagcgaatgcctgtattagatgaagctagttatttggagaagagagccgcttcttcacaagcaactgtttcattaactaagtctactccatccgctgcttctggaggctcgcttaaggttccaaatggtgcagtgaaaccaccaccagctcctttggctgatttacttgatctaagttcggatgatgctcccgtgactacttctgctcctagtacagcacctaatgatttcctacaggatcttttgggcattggcttgactgatacatctactgcaggtggagcgccgtctgcaagtacagatattctgatggatcttctatctattggatcatatcctgtacaaaatggtccgccggcaacatcaaacataagctctcctggccaagtgactaaacatgctcctggaacacctcaagttatcgatcttctcgatggtttgtccccaagtacaccacttcctgatgtgaatgcagcttacccatcaatcacagctttccagagtgcaactttgaaggtcaccttcaattttaaaaagcagcctggaaagcctcaagagactacaatgcatgccagctttacaaatttgacatctgctacattgaccaatttcatgtttcaggcagctgtaccaaagttcatccagttgcgcttggacccagcaagcagcagcacccttccggccagtggaaatggttcaattacgcaaagcctcagtgtcactaataatcaacatggacagaaaccacttgcgatgcggatccggatttcgtacaaagtgaatggcgaggacaggctggagcaagggcagatcagcaatttccccgcggggttgtagtgtcgccacctgtgtctataatgttgtgatagtagctctttcacttttgagtgtgctgctctgcttgcgaaggcgagttttccttttctagcccccccaccatcatttcttccccttctgttgcttgccgattagtaagttatgtacaccactagctgtctttttttgttttgccatttgccctttacatatactgtatagtagctggcagtgattaatgacacacacctccagttttgccaaaatgtattcgtacagaaggtgtatatcattcacagtcggaggataaccaaaattttcggcct

SEQ ID NO: 4282 - DNA, 3063 bp, Zea mays
ccgcctcccagatccgcctggccgtcctccttctcgtccgccactgcggcggtgatccctcgccgccccgcccttgataccgtcgagaggatcgtcgaggacttcgccatggacctcgccatcaatcccttctcctccggtacccgcctccgggacatgatacgtgcgatacgcgcgtgcaagacggcagcagaggagcgcgccgtggtgcggcgggagtgcgcggcgatacgggccgctatcagcgagggtgaccaggactaccggcatcggaacatggccaagctcatgttcatccacatgctcggctaccccacacacttcggccagatggagtgcctcaaacttattgctgccgcaggcttccccgagaagcgcatcggctatctaggactcatgctgctgctcgacgagcggcaggaggtcctcatgctcgtcaccaactctctcaagcaagatcttaaccactcaaaccagttcattgttgggcttgcactctgtgcccttggcaatatatgttctgctgaaatggcgcgtgatcttgctcctgaagtggagcggctgttacaaaatagggaccctaatacaaagaagaaggccgctttatgctctgtaaggattgtacgaaaagttccagacttggcagaaattttcatgagtgccgccacatcattactgaaggaaaaacatcacggtgttctgatatctgctgttcagctttgcatggagctatgtaatgccagcaatgaagcattggagtacttgaggaagaattgccttgaaggactggtccgaatactgagagatgtatccaacagttcatatgctcctgaatacgacattggtggcatcacagatccattcttacatatccgagtgcttaaactcatgcggatactgggccaaggagatgcagattgcagcgagtatatcaatgacattcttgctcaggtttcaacgaaaaccgagtcaaataagaatgctggaaatgctattttatatgaatgtgtggagacaataatgagcattgaagctacaagtggtttacgtgtgttggcaattaatattttgggccggtttttgtccaaccgcgataacaacataagatatgttgccctaaacatgcttatgaaggccattgccgtagacacacaagcggtgcagaggcacagggcaacaatattagagtgtgtcaaggatgcagatgtttctattcgtaaaagggccctggaacttgtttacctacttgtcaacgatacaaatgtaaagccattgactaaggaacttgttgattaccttgaagtgagtgatcaagatttcaaggaagacctcactgctaagatatgctcaatagttgaaaagttttccctggacaggctatggtacttagaccagatgttcagagttttatctctggctggtaatcatgtgaaggatgatgtatggcatgctcttatagttctagtgagtaatgcatctgaacttcaaggatattcagtcaggtcattatataaggcattgcaagcatctagtgaacaggaaagtttagttagggtggctgtttggtgcatcggtgaatatggagaaatgctggtcaacaatcttagtatgttggacatggaggaaccaattacggttgttgaatctgatgctgtggatgccgtagaggctgctcttcagcgctactctgcagatgttactactagggctatgtgtcttgtctctcttttgaagctttcctcccggtttccaccaacatcagagaggataaaagaaatagttgcgcaaaataaagggaatactgtgcttgaattgcagcaaagatctattgaattcagttccattatacaaagacatcaatcgatgaaatcatctttgcttgaacggatgcctgtattggatgaagctaattatttggtgaagagagctgcttctatacaggctgcagttccatctgtaaattctgctccagcaatcacttctggaggcccatttaagcttcctaatggtgttggaaagcctgcagctcctttagcggatttgcttgatttgagttctgatgatgctccagtgactacctcggcccctacaacagcacctaatgattttctacaggatctgttgggcattggcttgactgattcgtctcctataggcggagctccgtctacaagcactgacattctgatggatcttctatctattggttcatcttctgtacaaaatggaccaccaacggcaaactttagccttcctggcatagagactaaatctgtcgctgttacacctcaagttgtggatcttcttgatggtttgtcctcaggcacatctcttcctgatgagaacgcaacctaccccacaatcacagcattccagagtgcaactttgaggatcacattcagtttcaaaaaacaacctggaaaaccacaggagactgcaattagtgcttctttcacaaatttagcaaccactacattcacagatttcgtcttccaggcagctgtgccaaagttcatccagttgcgtttggacccagcgagcagcagcactcttcctgccagtggaaatgggtcagttacacaaagcctcagtgtcaccaacaaccagcatggccagaaaccacttgcaatgcgtatccggatgtcttacaaagtgaatggtgaggacaggctggaacaagggcaaatcagcaactttcctgctgggttgtagggccacctgtgtctatagggtttgggttgctctttcagacttatgcttgcctgctagtgagttgtgtacactggtagttggtttttggccgtccattatctctttatatatatagtgtacagtagatggcagtgattaatgatatatcctcagttttgccgaaatgtatttttatcttggtgcatatcggacttcagggtaaccaaaattttcacccttttccccgcgtaccaagcaccaaaggaatgtgttgtaccatgatattccccaatgtaattatttatttttctaatcattgtacaagcttaaaaaaaaaaaaaaaaaaaaaaaaaagaaaaaaaaaaaaaaaaa

SEQ ID NO: 4283 - DNA, 3030 bp, Sorghum bicolor
gagatctcaacatggacacggtcgagaagatcgtcgaggacttcgcctcggacatcgccctgagccccttctcctccgggacgagcctccgggagatgatacgcgcgatacgcacgtgcaagacggcggcggaggagcgcgcggtggtgcggcgggaatgcgcggcgatacgcacggccatcagcgagaatgagccggtgctccggcacagaaacatggccaagctcatgttcatccacatgctcggctaccccacccatttcgcccagatggagtgcctcaagctcatcgcggccacggggtacccggagaagcgggtgggctacctcggcctcatgctgctcctcgacgagcgtcaggaggtgctcatgctcgtcaccaactccctcaaacaagatctcaaccacacgaaccagttcatcgtgggtcttgcactgtgtgctcttgggaacatctgctctgctgaaatggcacgggatctttcacctgaagtggagagcttgatgcgcactagggatgtcaatacaaagaaaaaggctgctttgtgctctataaggattgtcaggaaagtgccagatttggcagagaacttcatgggactggctgcatcattgttgaaggaaaaacaccatggggttcttatatcagcaattcagctctgcacagaactatgcaaagcaagcagagatgctctagagtacctgagaaagaactgcattgaaggtttggtgcgcatactgagagatgtgtccaatagttcatatgctcctgagtatgatgtttctggcattgttgatccattcttgcatattcgagtccttaaacttttgcggatcctgggtcaaggagatgcagattgcagtgaatatatgaatgatattcttgctcaggttgcaacaaaaactgagtccaacaagaatgctggaaatgccattctgtacgagtgtgttcagactataatgggtattgaagctactagtggtttgcgtgttctggcaatcaatattttgggtagattcttgtctaaccgtgacaacaatataagatatgttgctcttaacatgcttatgagggccattgcagttgatgcactagcagttcagaggcacagaacaacaatattagagtgtgtaaaggatgccgatgcctccattcgcaaaagggctcttgagcttgtttatttgttagtcaatgatacaaacgtaaagcctttgactaaagagctcattgattacttaaacatagcggatccagactttataggagatctcacagtaaagatatgctctatagttgaaaagttttctcaagagaagttatggtaccttgaccagatgttcaaggttttatctctggctggaaatcatgtgaaggatgatatatgttatgcccttattgttgtactaagtaatacagcagagcttcaaggatattcagtgaggtcattgtataaggccttacaatcatttggtaaacagggaagtttagtaagagtagctgtttggtgcattggtgaatatggtgaaatgctggtgaacaatgttggcatgctggacggggaggagccagttaaggtaacagaatctgatgctgtgggtatcgtagaggtcgctcttaaccgctactcagcagatgtgacaactggagctatgtgtctggttgctcttctgaagctctcctcacgatttccttcgatgtcagagagggtaaaacaaatagttgcccagaataaagagaatgttgtgcttgaactacagcaaagatcaattgaattcacttccattatacaaagacatcagtctatcagatcatccttgcttgaacgcatgcctgtattggatgaagctagttatctggtgaagcgggctactgctacacaagcaactatttcagcagataaacttgccccaacagtcactcctggaagccttaagcttccgaatggtgtagcaaaacccacctcagctcctttagctgatttgcttgatttgagttctgatggtgccccagcttcaaccgttgcttctactacaacacctaatgattttttgcaagatcttctgggtattggtggagtgagttcatcaacgacaggtgtaacttcgaccgcaagcacggatattcttatggatcttctgtccattgggtcatctccatcacagaatggcactcccgtaacagacttccatcatcctggacaagagtctaaacctgttcctgctgtacctgaagctattgacctcctcggtagtttgtcaccagagactaaacccacaccagtggtacctcagggcatggatctgctcgatggtttgtcatcaaatacttctgtttctggacttgagaatacaacccatccatcaataacagctttccagagtgcaaccttgaagatcacgttcgatttcaaaaggaagcctggaaacccacgagagactacaattcatgccacttttacaaatttgacatctagtacttttacagattttatttttcaggctgctgttccaaagttcatcgaattgagactggatccggctagtggcaacactgttccagcaaatggaaatggttcggtcacacaagggctcaacgtgaccaataaccaacagggacagaaaccgcttgcaatgcgtatccggatgtcgtacaaagtgaatggcaaggacagattggaacaaggccaagtcagcaattttccttctggactatagtgccgttcgtgtatattatatgtcatgttgtgatagttctctgaaattgacgtgtcggggacaggcacagagcgaagccttattttaccccgttcctcgtttttttaatattcttgtcaccccccatttgtgggggttacatagagaaaatagtttcttccggccattcatttcccctacatatattgtatagtatccagcagagatgtgatcttcagattcatcgtgatgtattcgacaccacgccaaaggataatctgatctgaagaagtttattcagctcctcatcattacaaagagcttatgtttttcttgt

SEQ ID NO: 4284 - DNA, 2628 bp, Ricinus communis
atgaatcccttctcgtccggtacgcgtctaagggacatgattcgggcaatacgtgcttgtaaaactgctgcagaggaacgtgctgttgtaagaaaagagtgtgctgctattcgtgctgcaattaatgaaaatgatcaagattacagacaccgtaacctggccaagctcatgtttattcacatgcttggttatccaacacattttggtcagatggagtgcctgaagttgattgcgtcagctggatttccagagaagagaataggatatcttggcctcatgttacttcttgatgaaagacaagaagttctaatgttggtcacaaactcgttaaaacaagatctcaatcactcgaaccagtatattgtcggacttgctctttgtgctttggggaatatatgttcagcagaaatggctcgtgatcttgcaccggaagtggaaagactgctgcaatttcgggatccaaatattcgcaaaaaggcagcattatgctccatacggattataaagaaagtccctgatctggcagagaatttcataaatcctgctgctgccttacttaaagaaaagcatcatggagtcttaataacaggcattcaactttgtacagatctatgtaaagtcagtccggaagccctagaatatttcagaaagaaatgcacggatggtttggtcaggactctaagagatgttgtgaacagtccatatgcgcctgagtatgacattgctggcattacagatccgtttctccatatcagattgcttcggcttttgcgcatgttaggccaaggagatgctgatgctagcgatgcaatgaatgatatacttgcacaggtggcaacaaaaaccgagtcaaacaaaaatgcagggaatgctattttgtatgaatgtgtggaaactatcatgagcattgaagataacggtggcttacgagtacttgctattaatatcttgggaagattcttgtcaaaccgcgacaacaatatcagatatgttgcattgaacatgctgatgaaggccattactgtagatgctcaagcagtacagaggcatcgggcaacaatattggaatgtgttaaagattcagatgcttcaatccgtaaaagagccctagaacttgtttatcttctagtgaatgagagcaacgtaaagcctttgacaaaagaactaattgaatatttggaagtaagtgatcaagaatttaagggagatcttacagccaaaatttgctccattgttgaaaagttctcccctgaaaaaatctggtacattgatcagatgctcaaggttcttactgaggctggaaattttgtaaaagatgaagtgtggcacgcccttattgttgtgataagcaatgcctctgatctccatggatatgtagtcagggcactatacaaagcatttcaagcatcagcagaacaggaaatccttgttcgagtggcagtctggtgcattggagaatatggtgacttgttggtcaacaatgttggggtgctcgacatagaggatactataactgtaacagagtctgatgctgtggatgttgttgagattgctataaatcgtcatgcctctgatcttactactaaagcaatggctttaattgctctattgaagctctcttcccgcttcccatcttgttcacagagggtcaaagatataattgttcaaaataaaggaagccttgtgcttgaattgcagcaaaggtcacttgagttcaattctattatcgagaagcaccagagtatcagatctgcgctggtagaaaggatgccagtcttggatgaggctactttcagtggaaggagggctggctcattgccaacaactgtttcaacttctagtggggcatcacttaatattccaaatggagttgctaagccctcagcagctcctcttgtagatttacttgatctgtcagatgatgctccagctcctagctcttctggtggtgactttcttcatgatcttctgggtgttgatttagcgccaggttcaacacaaccaggctcaaaccaggctccaaaagccggcaccaatattctactagatcttttgtcaattggaacaccccctgtacaaagcagctcgtctacatctgacctattattatctggtcaagataaccagacacctatcaccacattagatgcactatcctcgccttttccttctgcacaagtcaagtcttctgttggagcttctcccatgatggatttgttggatggctttggccctagcccgtcaaagcatgaggaaaatggcacagtttacccatctatagttgcatttgagagcagcaacttgaggatgacattcaatttctcaaagtcacctggaaacccgcagacaacaataatacaggcgacttttgcaaatttatcacctaacgcatttaccgattttgttttccaggcagcagttccaaagttccttcagctgcacttagatccggctagcagcaatacattacctgcgagtggtaatgggtctctcacgcaaaatttgagagtaactaacagccaacacggaaagaaaccacttgtgatgcgcataaggatcgcttacaagatgaatggcaaagatatgttggaagaaggacaaatcaacaatttccctcgtgatttatga

SEQ ID NO: 4285 - DNA, 3151 bp, Vitis vinifera
gaggcaattcgttgtgattgcaggggaaagcctcttttcagatttattcgttagaagtttcatactctcagatccaaatccctcagatctccgaactaacgtatccggatctcgattccctcattcagattatctatttctacgattcctttctgatctaccggtccctgctcctcgtccattccggatccgatcgagctcgccagaagcttcacgacggacccaatcatgaatcccttctcgtccggaacgcgcctgagggacatgattcgggctatccgtgcttgcaaaaccgcagcagaggaacgtgctgttgtaagaaaggaatgtgctgctattcgtgcatcagtcagtgaaaatgatcatgactataggcaccgtaacctagcaaagctcatgttcattcacatgcttggttaccccacacattttggtcaaatggagtgcctgaaattgattgcagcggctggatttccggaaaagagaataggatatcttggcctcatgttgcttcttgatgaaaggcaagaagttcttatgttggttacaaactcattaaaacaagatctcaatcataacaaccagtacattgtgggacttgctctttgtgctctgggaaatatttgttcagcagaaatggctcgtgatcttgcacctgaagtggagagattgatgcaatttcgagatccaaatattcggaaaaaagcagcattatgctctataaggattataaggaaagttccagatctggcagaaaattttatgcatcctgctaccaacttacttaaagaaaagcaccatggagttttgataactggagttcagctttgtacagagatatgcaaagtcagcgtggaagcccttgaacattttaggaagaagtgcacagaggttttggtcaaagttctaaaggatgttgtgaacagtccttatgcacctgagtacgatattgctgggattacagaccctttcctccatatcagattgcttaggcttttacgggtgctgggccaaggtgatgcagatgctagtgactgtatgaatgacattcttgctcaggtggcaacaaaaactgagtcaaacaaaaatgctgggaatgccattttgtatgaatgtgttgaaactattatgagcattgaagatactagtggcttacgtgtgcttgccatcaatatcttgggaagattcttgtcaaatcgtgacaacaatatcagatatgttgcattgaatatgctgatgaaggctattacagtagatgcgcaagcagtgcagaggcatcgggcaacaattttggaatgtgtaaaggattcagatgcttcaattcggaaaagggcccttgaacttatttatgttctagtgaatgacagcaatgtgaagcctttggcaaaagagctaattgattatcttgaagtaagcgatccagaattcaagggagatctgaccgccaaaatttgctcaattgttgaaaagttttcccctgagaaaatatggtacattgatcagatgctcaaggttctttctgaggctggaaattttgtaaaagatgaagtctggcatgcccttattgttgtaataagcaatgcttctgacctccatggatatacagtaaggtccctttacagagcattccaagcatcagtggaacaggaatgccttgtacgagtggcggtctggtgcattggagaatatggtgaaatgttagtcaataatgttggaatgcttgatatagaggaacctataactgtaacagagtctgatgctgtggatgtcattgagattgccattaagcgccatacctcagatctcacaactcgagctatggctttgattgctctcttaaagctttcatgtcgtttcccatcttgttcagagaggataagggatataattgtccagtgtaaaggaagccttgtgcttgaattgcagcagagatccattgaatttaattccattattgggaagcatcaaaatatcaggtctgtgctggtagaaaggatgccagttctggatgaggcaacttacaatggaaggagggctggttctatgccagcaactgtttcaatgtcaagtggggcttcacttaatcttccaaatggagttgccaaaccccctgctgctcctcttgtagatttacttgatctaagttcagatgatacccctgcacctagttcttctggtggtgatttccttcatgatcttcttggtgttgacttatctgtgggttcatcattgtcaggtatgactcaggttccaaaagctggtacagatgttctcctggatcttctgtcaattggaacacctcctccggcacaaagcagcttatctacacctgatattttatcttctagtcaagataacaagatgccagctcccacattagaaagactgtcatcaccttcttcaatatccattcaagcctcatctcctgcaggggctgctcctatgatggatttgttggatggctttgcccccaacctaccattgcctgaggacaatggtcctgtttatccatctatagtcgcatttgagagcagtgccttgaggctaacgttcaacttctccaagacacctgcaaatccgcaaacaacattggtccaggccagttttacaaatttgtcacctaatatctttacagattttattttccaggcagcagtcccaaagtttcttcagttgcacttagattcagccagtggcaacacacttcctgcaagtggaaatgggtctatcacacaaaatttgcgagttactaacagcctacatgggaagaaacctcttgtcatgcgcataaggatagcttacaagatgaacaacaaggatgtcttggaggaaggacaaatcaacaatttccctcgtgacttatgaggtgatttaaagatagtaaagatggtgctgtgatgcatgggctcttttttctcctttttcttttttcaactgagaagtgtctctttggttgtctgtagtcatagtgcaatctgttgtttaattcttatatttttgggtggtatgtcctatagcaattgggacttcgtttgtatgacttgaattttggggtctgccaaatggcttagcaattctatcctatccttagctgtttcaatgtacattatgataaaatatttgtttacggaaattgaggaaattgaatttt

SEQ ID NO: 4286 - DNA, 1422 bp, Sorghum bicolor
atggcgcagaagaccgtgatcctctacccttcgctgggagtcggccatctgaaccccatggtggagctggccaaggtcttcctccgccgtggcctagccgtcatcatcgccgtcgtcgacatgcccgacaaggactccgtgtcggccgaggcgctggaccgcctcgccgccgccaacccggacatcgcgttccgcctcctccctgtcccgtcctgcggcacgagaccttactctcacccggtcatgcgcgccatcgacgtgctccgcgtcgccaaccccgtgctcctgggcttcctgcgcgcgctccccgctgtcgacgccatcgtgctcgacatgttctgcacggacgcgctcgacgtcgccgccgagctcaacaccccggcgtacttcttcttctcctccgcgctagccgacctcgccatcatgctccacatgccgtactactaccccaccgcgccgtcctcgttcaaggacatgcccgacaccgtgctgcacttccctggcgtgccaccgatccgcgcgctcgacatgggcgcgacgatgcaggaccgggacagcgacgtcgccaaggcacgcctctcccagtgcgcgcgcatgctcgaagcgaggggcattctcgtgaacagcttcgactggctggaggcacgggccctggaagcgctcagccgtggcctctgcacgccggggcgctcggctccaccagtccactgcatcgggccgctggtccttcccggaaacaggggaggggccagcgagaggcacgcgtgtctggaatggctggacgcccagccggaccagagcgttgttttcctcagcttcggcagcctggggacgttctcagcgccgcagctgagagagatagcgcgtgggctggagagctccgggcagaggttcctgtgggtcgttcggaacccgcctgagcaccggagcaactccggcgagccggacctggtcctggagccgtcgttgctccccgagggtttcttggagcgtactagggaaaggggcttcgtggtgaagaactgggcgccgcagagcgaggtgctgcggcaccggtccatcggcgcgttcgtgacgcattgcgggtggaactcggtgctagagggcatcgcgtctggcgtgccgatgatctgctggccgctatacgcggagcagaagatgaataaggtgcacatggtggaggagattaaggttggcgtggtgatggaggggtacgaggaggagctggtaaaggcggaggaggtggaagcaaaggtgaggctggtcatgtccggcgacggggaggagcttaggcagaggctcttgacggccaaggagatgactgtagaggttctcaaggaaggtggctcatctgacgtggcgtttgacaagttcttgacggacttgatgaagaacacctgtacggagaatagtgccttgtga

SEQ ID NO: 4287 - DNA, 1817 bp, Zea mays
attggcattcccacgtcgagaactgcctgcctcaaggccgtcatggcgcacaagaccgtgatcctctacccttcgctgggagtcggccacctgaaccccatggtggagctggccaaggtcttcctccgccgcggcatggccgtcgtcatggccatcgtcgactcgcccgacaaggactctgtgtcggccgaggcgctggcccgcctcgccgccgccaacccggacatcgcgttccgccacctccccgtcccgtcccgcggcacggaacgttgctctactaacccggtcatgcgcgccatcgacgtgctccgcgccgccaaccccgcgctcctgggcttcctgcgcgcgctacccgccgtcgacgccctcgtgctcgacatgttctgcacggacgcgctcgacgtcgccgccgagctcggcgtcccggcgtacatcttcttctcctccgcgctaggcgaccttgctgtcatgctccacctgccgtactactaccctacggccccgtcctcgttcaaggacacgccggagacggtgctgcacttccccggcgtgccaccgatccgcgcgctcgacatgggtgcgacgatgcaggaccgggacagcgacgtcgccaaggcacgcctgtcccagtgcgcgcgcatgctcgaagcgaggggcattctcgtgaacagcttcgactggctggaggcacgggccctggaagcgctcagccgtggcctctgcacgccggggcgctcagctccgccagtccactgcatcgggccgctggtcctcgctggaaacaagggaggggccagcgagaggcacgcttgtctggaatggctggacgcccagccggaccggagcgttgttttcctcagcttcggcagcctggggaggttctcgatgccgcagctgagagagatagcacgtggactggagaactccgggcagaggttcctgtgggtcgtccggagcccgcctgagcaccggagcaactccgtggagccggacctggacctggagccgttgcttcccgagggtttcttggagcgtactagggaaaggggcttcgcggtgaagaactgggcgccgcagagcgaggtgctacggcacctttccatcggtgccttcgtgacgcactgcgggtggaactcggcgctagagggaattgcgtctggcgtgccgatgatctgctggccgttgtacgcggagcagaagatgaataaggtgcacatggtggaggagttgaaggttggcgtggtgatggaggggtacgaggaggagctggtaaaggcggaggaggtggaagcaaaggtgaggctggtgatggcgcccggatctggcgacggagaggagcttaggcagaggctcgtgacggccaaggatatggctgtggaggttctcaaggaaggcggctcatctcacgtggcgtttgacgcgttcttgacagacttgctgaagaacacccgtacggagaaaagtggcttcttgtgaggtgcaacggctatctgtattccagattatcgaagagcattgattaggagacgaccgctgttctaccatcaattccgtagctcaagcgaccttgttaagaacataatcacaatttttaggttataaagttagacgtgatcgacctagagcctgttcgtttggctttaatatgtacctactacttatacaacgttttgtctttatagattacacgttacatcgtcacttgttctactcgaatgtaaattgagaaatgacatgtactaatgctcgggttgtatacgtgttcattgtttatctggtgtttccacaatagaaactactgagacattatcattcat

SEQ ID NO: 4288 - DNA, 1392 bp, Sorghum bicolor
atggagaagcagatgaagaccgtggtcctctacccttcgctgggcgtgggccatcttaaccccatggttgagctgggcaaggtcttcctgcgcagtcgcttgtctgtcatcatcgccgtcgtcgactcgcccgacgccatgggccgcctcgccaccgccaacccggacatcacgttccgtcacctcccagtccctcccaccggcaaggacaagtactcgcaccctatcatgcgtaccatcgacgtgcttcgcgtcgccaaccccgcgctccggagcttcctgcgcacgctcccggccatcgacgccgtcgtggtcgacatgttctgcaccgacgccctcgacgtcgcggccgagctcgacatccccgcctacttcttcttcacatccccgctcggccacctcgccgtcaacgtccacctcccgtacaacttccccgcggtctcactgaaagacatgcccgagaccatgctgcacttccccggggtgccgccgatccgcgcgatggacatggtgaccacggtgcaggacagggagagcgacatcaccagagcacggctgcgccagtgcgcgcgcatgcctgaagtgagaggctttctcgtgaacagcttcgactggttggaagcacgggcgctgaaagcgctcaggtctgggctctgcacgcccggccgctcaacgccgcctgtctactgcattgggccgctggtaccgcccgggaacacgggaggaagcagggagaggcacgcctgcctcgagtggctggacacgcagccgaaccggagcgtggtgttgctcagcttcggcagcatgggcatcttctcggagccgcagttgagagagatggcacgcgggctagagagttcggggcacaggttcctgtgggtcgtgcggaacccacctgagcaccagagcagcaaatcaatcgagccggatctggaggcgttgcttccggatggtttcttggagcggactagggagaagggcttggtggtgaagaactgggcgccgcagatggaggtgctgcggcacgacgccgtcggcgcgttcatcacgcattgcgggtggaactcggcgttggaggggatcgtgtccggcgtgccgatgatctgctggccgctgtactcggagcagaggatgaacaaggtgcacatggtcgaggagatgaaggttggagtggcggttcaaggctacgagaaggaactggtggaggcagaccaagtggaagcaaaggtgaggctggtcatggagtccgatgaagggaagaagcttaggaagaggctcgcgatggcaaagaagatggccgctgacgctctcaaggaaggtgggtcgtcatacatggggctcgagaagttcttggaaggcctgaagaagagcagcccggagctgaaggcataa

SEQ ID NO: 4289 - DNA, 1520 bp, Zea mays
gcctgcccggcgctctcgtccgatcgcgcatcgcctcctttcggaatcttctcctccgggctccggatgttccttcccaagcatccgagccctacccgtccggggcgcacctgcctgcaaccaggcgttcctctcgttcgccctcgctcccgcatccccgcgacgacattatcagaacggcgacatctccttcggtcgtcggccgctgcctcctccagcttcccgtccagggattccccactctctgccgcgaaggggtcatcgcagaataagccgccggatgaaatcaggaggtggaaggcggtgtcgcctggaatgcgcgagtccgctgaccctgaaactgaaactgaggacccatcaccgccgcggacggccctctggtcggcgaggcggagggcacgcgctgcgtggcggaaggtggtgtcttgggtgcccaggaaggcccggagcctcgtactactcaatctggtcactcttatattcgctagcaacatttcagttgtgaaacaggcagaggctcttttggaccctgaccttttcaatatgttaaggttcactatagcagccatcccttttgtgccgctgttactaaaatcgctgaggaatatgcaaatcctttttagaggactagagttgggcatttgggtaagcgtggcctaccttgctcaggctatggggttagttacggctggtgctggacgtgcatctttcatttctgcactcacagttatcatcgtcccgttcttggatggtcttattggagcagaagtacctgcccatacatggtttggggcatttttatcactttttggtgttattatgctggagctaagtggttctccaccatgtgttggtgatcttctgaacctcttgagcgccttttcttttgcaattcatatgctcagaactgagcatatttcaagaaatataaagaaagaaaatttcttaactcttgttggatgtgaggtgtttgttgtagcaatcctatcagcagcgtcatatacttttaaatgcttcacacaaaatgtacaacactggaatttgaaagtatggtctccatcagagttatttggtatggcgatgttgtttccttggccagcaattctatacacaggcatattgtcaacttcgttttgtttatgggcagaggtggccgctatgcgcgttgtatcagctacagaaactgcaattatttatggtctggaacctgtatggggtgctgcttttgcatgggtaatgctcggcgagagatggggcctgacaggatttgtcggggctatcttcatcatggctggcagcttgatggttcagatatatggatcaatcctagatgatgtatctagaggagacgattaccagatgaacatttaaatgtacatattacagaagatgaagcaagttgtaattcatgatgaagcaagttttttcccatttatagggtaggtagctacgagcaagtgtaaccaaactctcaaagtttgcccccccccccccacacacacacacacacacattcctcc

SEQ ID NO: 4290 - DNA, 1605 bp, Zea mays
aaaccggagaacgggaagcgaccagagggcggccgcggcacgcggkycgtccccattccagtcttttcagaacgagattgcatcgaggaaactacagaaaagggaccaaatcgaatccgtggtgcactgcccctccccctccctcacaagccgccgccgccgtgaggactccggcgaatggcgtcccgcgtcgcctcgggcctcctccgccgccgcgccgtcgccactctagggctactaaggagtcatacacatgtcagaaactacagcagtcaactttcagctttgattccagctacttctcaatgctcaaatctgacaagaagacgctattacttacctaatccatctctgtaccaagtttggagtaggtcatttgcctcagacagcggagacaagttcgaggctgttgtgcccttcatgggtgaatctgtaactgatggaactcttgctaacttcttaaagaagcctggagacagagtcgaggccgatgaacccatagcgcagattgaaactgataaggtcactatagatgtcgcaagtcctgaagctggtgttattgaaaagctcattgctagtgaaggcgacacagttactccaggcactaaagttgcaatcatatccaagtctgctcaacctgctgaaacacatgttgctccatctgaggaagcaacttcaaaagggtcttctccgccgaaagttgaagagaaatcaagggtagaggaaaaagccccgaaagtagaacctcccaagatgcaagcaccgaagccaactgcaccattaaaaacgtccccttcagaaccacaactccctccaaaagaacgggagcggcgggtgccgatgccaaggctcaggaagcgtattgcaaaccgtcttaaggattctcagaacacctttgcaatgctatctacatttaatgaagttgacatgaccaatttgatgaagcttcgttctgattataaagatgaatttgtcacaaagcatggtgtcaaattgggtcttatgtcttgctttgtcaaggctgctgtttctgcacttcaaaaccagccaattgttaatgctgtcattgatggcgatgacatcatatacagagactacgtagacgtcagtgttgctgttggcacttccaagggccttgtggtgcctgttatccgagatgctgataccatgaactttgctgacattgagaaagggataaacaaccttgcaaagaaggcaaatgagggggcgctctcgattgatgacatggcaggaggaacattcactatctccaatggtggtgtctatggaagcctcctcagcacacctatcatcaaccccccacagtcgtcaattctggggatgcattccattgtgcaacgccctgtggttgtgaatggtgacattctcgcaaggccaatgatgttccttgcgctgacatatgaccacaggctgatcgatggcagagaggctgtattcttcctccgtcgcatcaaggatgtcgttgaggaccccaggaggttgctgcttgacatataaagttacttaccagtgctttcccgccgactgttttgtgctttctggaaataataccatgcaaatttttgaccaaaaaaaaaaaaaaaa

SEQ ID NO: 4291 - DNA, 792 bp, Sorghum bicolor
atggcgtggatctggatggtcctcgcggcgggagccgtgctcctgtgggcgatttctctggggcggattctctcctactcctctccgtcctgtgtgcccctgagcccgcagttcatgccccctctccgcggcgacaggaggagccggaacgtgctgctcgtcgtcgcccaccccgacgacgagtccatgttttttgctccaactattctttttcttaagtcaaaaggtcacaacattcacattctgtgcatgtctcgaggtaatgctgatggtcttggaaatactcgtaaagaagaattgtaccatgcatgtgaaacccttaagattccacatgaacaagttaaagtcttggaccacccgaaattgcaggatggatttcatgagcaatgggaccatggactagtagcagaacttaccatggagcatgtcctgctatgggccattgacacgattgtaacatttgattcatatggagtatcaggccatccaaaccacaaagatgttcatcatggcatatgcaagtttctccatgcaaacaggcaaggaaatgttgaagcttgggaactagcaagcctgaatattcttcgcaagtacagtggtccagttgacatttggctttcttccttgatctccttctcaaggtcaaagcagtcaatctatactctagttaacagtagcccgtcccgaagctatgaggcaatggctgcacacagaagtcagtgggtttggtttagaagattgtttgtcatgttctctagttatacgtacataaatacgctacagaaaatttaa

SEQ ID NO: 4292 - DNA, 1070 bp, Zea mays
ctcccttcctctagcgcctgctgcctctctcactccatggcgtggatctggatggtcctcgcggcgggagccgtgctcctgtgggcgatctctttggggcgggtcctctcctccgccgcgccgtcctgtgtgccctcgagcccgcagttcatgccccctctcagcggtgacaggaggagccggaacgtgctgctggtcgtcgcccaccccgacgacgagtccatgttcttcgctccaaccattcttttcctcaagtcgaaaggccacagtattcacattctgtgcatgtctcgaggtaatgctgatggtctgggagatactcgtaaggaagaattgtaccacgcctgtgtcagcctcaagattccacatgaacaagtcaaagtcttggaccacccaaaattgcaggatggatttcatgagaaatgggaccatggactagtagcagaacttaccatggagcatgtccaactgtgggccattgacacgattgttacatttgattcatatggagtatcaggtcatccaaaccacaaagatgttcatcacggcatatgcaagtttctccatacgaacaggcaagggaacgtggaagcttgggaactagcaagtctcagtattcttcgcaagtacagtggtccgattgacatttggctttcttcattgacgtccttcgcatggacaaaacagccaatctatactctagttaacagtagcccgtccagaagctatgaggcaatggctgcacacagaagtcagtgggtttggtttagaagattgtttgtcatgttctcgagttatacatacataaatatgctacggagaatttaacatgtgatgtggcgtcataccatgataccagagcaagccgccattgtcgtctccaatgttgtacttgtgcatcgtcaattgtacatctatatgtatcactggattttagttgtacattctctatagacagtgctcatagggtgactgtagaatttcttttccccaatccagaattgcactgaatggctgaaatacagttgtctttcaaaagaaactgaaatacagtgatgctcactggctta

SEQ ID NO: 4293 - DNA, 1112 bp, Sorghum bicolor
agtgacagtttttctttggaaattcgtgttttcggctcgtcctccctccctccaggctccagagcctgctgcctctccatggcctggatctggatggtccccgtggcgggagccgtgctcctgtgggcgatctctctggggcggatcctctcctaccccgcgccgtcctgtgtgcccccgagcccgcagttcatgccccctctccgcgacgacaggaggagccggaacgtgctgctggtcgtcgcccaccccgacgacgagtccatgttctttgccccaactattcttttcctcaagtcaaaaggtcacagcattcacattctgtgcatgtctcgaggtgatgctgatggtctcggaaatactcgtaaagaagaactgtaccatgcctgtgacacccttaagattccacatgaacaagttaaagtcttggaccacccaaaattgcaggatggttttcatgagaaatgggaccatgggctagtagcagaacttactgtgcagcatgtccaactatggggcattgacacgattgtgacatttgattcatatggagtatcagggcacccaaaccacaaagatcttcatcacggcgtatgcaagtttctccatgcaaatgggcaaggaaacgatgaaacttgggaactagcaagcctgaatattcttcgcaagtacagtggtcctgttgacatatggctttcttccttgatatccttctcaaggtcaaagcaatcaatctatactgtggttaacagtagaccgtccaaaagctatgaggcaatggctgcacacagaagtcagtgggtttggtttagaagattgtttgtcatcttctcgagctatacgtatgcaaatgtgctaaagaaaatttaacatgtgatctaacgtcatgtcagagcaagtgatctgtccgcgattctcgtctccagtgtcgtacttgtacattgtcaattgtaaggaattcagttgtacattttctgtccatagccagtgctcatagggtggcagttggacttattcccaattttgtagtactacagtatctgtaagttctcggcacttcagtagcttatgcgtgtggtcaaacgatttctggtccaagtttgacgtccttc

SEQ ID NO: 4294 - DNA, 2925 bp, Zea mays
atggcgtggatctggatggtcctcgcggcgggagccgtgctcctgtgggcgatctctttggggcgggtcctctcctccgccgcgccgtcctgtgtgccctcgagcccgcagttcatgccccctctcagcggtgacaggaggagccggaacgtgctgctggtcgtcgcccaccccgacgacgagtccatgtatgttagttctccttgtggactcaatgcgcaattgccatgtctgtggaacgcctcacgcctgcttagttctggacttctggtttgatgtgttgcttgattgttattgttttctcatttttggcgctacaggttcttcgctccaaccattcttttcctcaagtcgaaaggccacagtattcacattctgtgcatgtctcgaggttagatgttaagcaactggcgctgtatgtttatttccgctgccctatacatttgttcatctgagcccagcacgaaacaggaacgtgcctgtgccactgtaatgtctgttaggatgtataataaaactgtcataggcaaccgtgatgtccttttactgtatcctcgacagtacaaaccagatattcatctctgatgcatgcacggtgcttaaacatgcagcgccactgtgtacatgatttttagtgaattaatacaaagtaaaaaaatagtaatatgtacatctcaagcgctatggaagcttttagcacaaagtctaatattatgttttgctcccatagcatgtgaacagtaattcacccagaacaaacttattccttcgacaggtaatgctgatggtctgggagatactcgtaaggaagaattgtaccacgcctgtgtcagcctcaaggtactcagatccttaattagtccattttaccttaaaaacaatctttatacagtttctgaagcagatcatgtcattacagattccacatgaacaagtcaaagtcttggaccacccaaaattgcaggtattttattttgagtccgtacttgcatactcctacatactgtttgaaaaacatgtgatcttgaccctatacatttcataggatggatttcatgagaaatgggaccatggactagtagcagaacttaccatggagcatgtccaactgtgggccattgacacggtagtggctacatctcagagagcttatgaacttcaaaatacattgcagttttagtattctaccggcttctcctctcactcgtattaagttacctcgagccattggtgcttgtttcttcgatcgtccaggttatagtgttgtagtaacatgagtattcaagtatacaaatatgcaggtctgcattttgtgtaatatataaaatgacatatattggggttatgcttgcccaaacattatcacttcttttcttaagaaaagacacttgtggccacagcttgccaaatctacttaaagatcctgagaatgaatccttgctatctgatacatcttaataaatttccatatttttcaaatctcaatatgcttcccttgccaatagccacttagtactctataccatattcagttgcctttaccttcatttactacatacctaaaaattgtttagtttttttttcctttgatggcagctgcttactgatgcaatatttgatgtcattttagattgttacatttgattcatatggagtatcaggtcatccaaaccacaaagatgttcatcacggcatatggttagttcagttgtctggtttaacactgcatgattagccacatgcatgaattgctgaaatggtttgttaacattgggactccgatatgttgggcatcagacctgttgttctttgactgtgcacaacttatgcttatttcatttacttgtgtatttttatgctacacatatgcatgtcacatttatgaggtagtttcgtattttcttcactcagagtctaaaatctttatttctatatgaacagcaagtttctccatacgaacaggcaagggaacgtggaagcttgggaactagtaagtttctccccctaaatccttcggcaaccttattatttggatttatttctcagactgatattcaccgtagagaggaagagaatatgtgtgttactttcttgactttgtcagtgctatgtttagctgaagctatgagctcttaatttttcttggaaccagaaacacataaactataatgctactgtctacattgccatctgcatttcgtagatgacttaatttttctttataatttttttttagattttgctgttttagggtgctgattgtaccatattttgtttcttcatgctggaagaacacattagtgtggaggagaaatgattcacgttggattattcataaatgcaggcaagtctcagtattcttcgcaagtacagtggtccgattgacatttggctttcttcattgacgtccttcgcatggacaaaacagccaatctatactctagttaacagtagcccgtccagaagctatgaggcaatggctgcacacagaagtcagtgggtttggtaagtgctataagagtttcgtatttgcattttcatggagatagcattctcttctgccaacttggatagcgtactggagatcaatccacgtagcctctataagttcataacaaagtttctggttgcatcatattcatatcgttactcgcaagatatcatgaccaacatataatgaatcactaacttgctggttgctgccatatatcatcagagatggcatctatcaataccttacctgtatcaggaaacaagaagtaccatgtttaactcagtagttagggattgtctttttttcttgaatatagggaagctctttttttattgaagataatcaacaaattccatgtgtctttccaggtttagaagattgtttgtcatgttctcgagttatacatacataaatatgctacggagaattta

SEQ ID NO: 4295 - DNA, 1424 bp, Hordeum vulgare subsp. vulgare
ggaaatctcctctgttctcctcgtcacgcgcgcacaccgccgccggagctctgcccgctccccgcccgccggccgtcctccgccccctggcacttcctccaccgcgcgagccctcccgtgccaacccctcttccgcgcggccccgtcccgccctctgccttctcctcgccgcgcctcgaccccagctctcctccgtccgcaaaggagaagaccagcagcggcggccccaatcgagggagggaggatcctctcagagaaatgtggggcatattggcttcagaagagaaaatatggagcattttatgagttagccttgttccagtactgtccgttcctagtacgttttctgcaccaagaggtcgtcggagctcctgcagcaaggtaaatccggcggccggactcagtgccatggcgtggatatggatgctctcggtggctggagccgtcctcctttgggcggtttccctcgggcggatcctctcttccccgacgccctactccctgcctccaagccctcgcttcctaccccctcttggcgataggaggagcaggaacgtgctcctggtgctcgcccacccagacgacgagtccatgtttttcactccaactattcttttcctcaagtcaaaaggccacaacattcatgttttgtgcatgtctctgggtaatgctgatggtcttggagatactcgtaaagaagaactgtatgatgcatgtgcaactcttaagattccagctgagcaagtcgcagtcttggaccatcaaaagttgcaggatgggtttcatgagaaatgggatcatggactattagccgaacttaccatggagcagatccagctgtgggatatcgacacaattgtgacgtttgattcctatggagtatcaggccatccgaatcatcgggatgttcatcatggcatatgcaagcttcttcatgagaatcaacaaggaaatattgaagcatgggaacttgtaagcctgaatatgtttcgcaaatacagtggtgcagttgacatttggttgtcatctttgatctcctcaagttcgaagcaactgatgtattgtctagttaactgtagcccagccagaacctttgaggcaatggctgcacacagaagtcagtgggtctggttcagaagattgtttgttacgctctcaagttacacatacgtaaacatgctccagaaaatttagcacttgatattgagaagtaccgtcttgtcgatctagattgtaaatgtgccttatggcacactttacaaaagcttcctgagattagggacagcagtttacagatcatatcctttaccgcataatgagagtttattctgtacaatccatccgagtttttcttttaaagtgcaatccatccgtgatagtacaatggtactgaaacttttaacctcaagtgatagtttcttgct

SEQ ID NO: 4296 - DNA, 1348 bp, Oryza sativa Japonica Group
gccggaagtcgtcgacgtcgaggggacgaggagcccaccggcgagcggtggcgccacgggggaggaaggcggcgagctgggcgtcggcgagaactcgaggagaccgacgagaggccagtccaccaccgcgcagccacacaggcacggggaagagtggcgcgcgcggccgccggagaaggctatggcgtggatctggatgctcatggcggcgggggccgtgctcctgtgggcggtttctctggggcgggtgctctcctcctcctcgccggcgtgtctgcctgccaactccaccttcctctcccctcctcgcggcgacaggatgagccggaatgtcctcctcgttctcgcccaccccgacgacgaatccatgttttttgctccgactattcttttcctcaagtcaaaaggtcacagcattcatatcttgtgcttgtctcaaggcaatgctgatggccttggaaatatccgcaaagaggaactctaccttgcctgtgtcactcttaagattccagctgagcaagttaaagtcttggaccactcagaactgcaggatggatttcataaaaattgggatcatggactaatagcagaacttaccctggcacaatcccagttatggaatatcgacacgattgttgccttcgattcccgaggagtatcaggccatccaaatcattgcgatgttcatcatggaatctgcaagcttctgcgtgacaacgggcaaggacacattgaagcatgggagcttgtaagcttgaacatttttcgcaagtacagtggtccagttgacatttggctatcttccaccctctcctcaagctcaaaacaaccaacttatactcttgttaataatagcccttccagaagctttgaggcaatggcttcacacaaaagccagtgggtttggttcaggagattgtttgtcctattctcaagctacacatacataaatgtgctccaaaaaatttgaagtttgttgtcgtgccaaagcaagcaccttccggctcagattgtcaaatgcctgtacatgcagagtgccagagtgtaagcgggaagcttctctgaagaaagacaacaatgttgacattggatcaggaattcgaaagatactgaaatgtgatgatgaaatgcaacagtttaggaacctttgtgattatatgccctttatacttgtgttgtaggccatcgattgtgttcatagagttagattggacctctgtatcctcagctagtttctcttgcttgaagagttattgccgttgttggacgatcaatctatattgcagtgttacacaaggtaactgatgaactgatattactatgctgtcgctcaagctgtattcaagcc

SEQ ID NO: 4297 - DNA, 1496 bp, Zea mays
cgccggcgaggccacacgcccaccatcagtcagccgccccgccaaagccatgcgcctccccgccggcgcacgcctcgcgctcctgctcgcccgccgctccctctcctcctccccccgcatcccgcgggcgcacacagggatatggagcgaggcgccctcccggagctctcccttctctccgccgagcagcgcccgcaggtccttccacgggaccaggccggtggcggcaagggactactacgatgtgctcggcgtcagcaagagcgccagccaggcggagataaaaaaggcctattatgggcttgcaaagaagctccacccagacacaaataaaggtgatgcggatgcagaacgcaagtttcaagaggttcaacgagcttatgagactttaaaggatgaacaaaaaagatcattatatgatcaggttggccctgatcagtatgagaaaactgcttctggcggaggcggaactggcttcgagggtggttttggaaatccatttgaggatatttttggtggtggcggtggcggtggtggaatgaatgatttctttaggaacattttcggggatagggactttggaggacgagatgttaaggttgcactcgaactatcatttgtggaagcagttcaagggtgcagcaaaacggtcaccttccaaacgtctgtaacatgtgaaatctgtggtggagccggtgtgcctcctggaaccacacctgaaacatgtctatcttgcaggggttcaggatttatattcatgcaaaccgggccattcaggatgcaatcaacctgcacaaaatgtggtggttctgggaaaactgtgaaggaattctgcaaggcatgcagaggaaacaaagttgtgcctggaaggaaatcagtccgccttgacatactgcctggttcggataatgaggacaccataaaggtggttcgatcaggtggagaagacccagatggccgtccaggtgatctttatgtgaccctcgaggttcgtgaggatcctgttttccgaagagagaaaggtgatattcatgttgatgctgtcctgaatgtgactcaggcaattttgggagggacagttcaagtcccaactctcagtggagacgttgttctaaagatcaagcccggtactcaacctggtcagaaggtagttctgagaggaaaagggatcaagacaagaaactcaccgtaccacggagatcaatatgtccatttcaatgtcaacatccccgaaaatttgacgtctagacagcgggagctgatcgaggaattcgcgaaggaggagcaaggcgaagacgagaaggacgccaaggcagcagctggagcatcggggggatagccggttttaggagccacagtagtgccttttagctggtatttataccgtgaccgtagacctgtctcaaattcgcagcggaaagatttatagataggtctttgtttcggattttgtagctggaataaatgaataatacgtctagaactgattttctgtc

SEQ ID NO: 4298 - DNA, 1578 bp, Zea mays
aagcccagctgacaacaccggcctccgagaagcagcgcaggcgcagggcattccagaacgttcggcggcggcgaggcgacacgcccaccaccagtcagccgccccgccacagccatgcgcctccacgccggcgcacgcctcgcgctcctgctcgcccgccgctccctctcctcctccccccgtatcccgcgggtgcacacagggatacggagcgaggcgccctcccggagctctcccttctatccgccgagcagcgcccgcaggtccttccacgggaccaggccggtggcggcaagggactactacgatgtgctcggcgtcagcaagagcgccagccaggcggagatcaaaaaggcctattatgggcttgcaaagaagctccatccagacacaaataaaggtgatgcggatgcagaacgcaagtttcaagaggttcaacgagcttatgagactctaaaggatgaacaaaaaagatcattatatgatcaggttggccctgatcagtatgagaaaactgcttctggcggaggcggaactggcttcgagggtggttttggaaatccatttgaggatatttttggtggtgscggtgscggtggtggaatgaatgatttctttaggaacatttttggggatagggactttagaggacgagatgttaaggttgcactcgaactatcatttatggaagcagttcaagggtgcagcaaaacggtcaccttccaaacgtctgtaacatgtgaaatctgtggtggagccggtgtgcctcctggaaccacacctgaaacatgtctatcttgcaggggttcaggatttatattcatgcaaaccgggcccttcaggatgcaatcaacctgcacaaaatgtggtggttctgggaaaactgtgaaggaattctgcaaggcatgcagaggaaacaaagttgtgcctggaaggaaatcagtccgccttgacatactgcctggtttggataatgaggataccataaaggtggttcgatcaggtggagaagacccagatggccgtccaggtgatctttatgtgaccctcgaggttcgtgaggatcctgttttccgaagagagaaaggtgatattcatgttgatgctgtcctgaatgtgactcaggcaattttgggagggacagttcaagtcccaactctcagtggagacgttgttctaaaggtcaagcccggtactcaacctggtcagaaggtagttctgagaggaaaagggatcaagacaagaaactcaccgcactacggagatcaatatgtccatttcaatgtcaacatccccgaaaatttgacgtctagacagcgggagctgatcgaggaattcgcgaaggaggagcaaggcgaagacgagaaggacgccaaggcagcagctggagcatcggggggatagccggttttaggagccacagtagtgccttttagctggtatttataccgtgaccatagacctgtctcaaattcgcagcgaaaaaaatatatagataggtctttgtttcggattttgtagctggaataaatggataatacgtctagaactgattttctgccaaaaaaaaaaaaaaaa

SEQ ID NO: 4299 - DNA, 1506 bp, Zea mays
cgcagggcattccagaacgttcggcggcggcgaggcgacacgcccaccaccagtcagccgccccgccacagccatgcgcctccacgccggcgcacgcctcgcgctcctgctcgcccgccgctccctctcctcctccccccgtatcccgcgggtgcacacagggatacggagcgaggcgccctcccggagctctcccttctatccgccgagcagcgcccgcaggtccttccacgggaccaggccggtggcggcaagggactactacgatgtgctcggcgtcagcaagagcgccagccaggcggagatcaaaaaggcctattatgggcttgcaaagaagctccatccagacacaaataaaggtgatgcggatgcagaacgcaagtttcaagaggttcaacgagcttatgagactctaaaggatgaacaaaaaagatcattatatgatcaggttggccctgatcagtatgagaaaactgcttctggcggaggcggaactggcttcgagggtggttttggaaatccatttgaggatatttttggtggtggcggtggcggtggtggaatgaatgatttctttaggaacatttttggggatagggactttagaggacgagatgttaaggttgcactcgaactatcatttatggaagcagttcaagggtgcagcaaaacggtcaccttccaaacgtctgtaacatgtgaaatctgtggtggagccggtgtgcctcctggaaccacacctgaaacatgtctatcttgcaggggttcaggatttatattcatgcaaaccgggcccttcaggatgcaatcaacctgcacaaaatgtggtggttctgggaaaactgtgaaggaattctgcaaggcatgcagaggaaacaaagttgtgcctggaaggaaatcagtccgccttgacatactgcctggtttggataatgaggataccataaaggtggttcgatcaggtggagaagacccagatggccgtccaggtgatctttatgtgaccctcgaggttcgtgaggatcctgttttccgaagagagaaaggtgatattcatgttgatgctgtcctgaatgtgactcaggcaattttgggagggacagttcaagtcccaactctcagtggagacgttgttctaaaggtcaagcccggtactcaacctggtcagaaggtagttctgagaggaaaagggatcaagacaagaaactcaccgcactacggagatcaatatgtccatttcaatgtcaacatccccgaaaatttgacgtctagacagcgggagctgatcgaggaattcgcgaaggaggagcaaggcgaagacgagaaggacgccaaggcagcagctggagcatcggggggatagccggttttaggagccacagtagtgccttttagctggtatttataccgtgaccatagacctgtctcaaattcgcagcgaaaaaaatatatagataggtctttgtttcggattttgtagctggaataaatggataatacgtctag

SEQ ID NO: 4300 - DNA, 1688 bp, Sorghum bicolor
agcacacgcgcggcgccggcgaggccacacgagcaccagtcagccgccaccgccatgcggctccccgccggcgcacgcctcgcgctcctgctcgcccgccgctctctctcctcctccgcctcctcctcctcccgcctcccgcgggcgcacagagggatatggagtgacgcagcacgcgtggtgccctcccggagttcgcccttctcgtcaccgagtagcgcccacaggttcttccacggaaccaggccggtggcggcaagggactactacgatgtgctcggcgtcagtaagaacgctagccaatcagacatcaaaaaggcctattatgggcttgcaaagaagcttcatccagacacgaataaaggtgatgcagatgcagaacggaagtttcaagaggttcaacgagcttatgagactttgaaggatgaacaaaaaagatcattatatgatcaggttggtcctgatcagtatgagaaagctgcttctggtggaggcggaactggctttgagggtggttttggaaatccatttgaggatatttttagtggtggcggtggcagcggtggaatgaatgatttctttaggaacattttcagggatagggactttggaggacgagatgttaaggttgcacttgaactatcatttatggaagcagttcaagggtgcagcaaaacgataaactaccaaacgtctgtaaaatgtgaaacctgcggtggagctggtgtgcctcctggaaccaaacctgaaacatgtccatcttgcaggggttcaggatttatgttcatgcaaaccgggcccttcaggatgcaatcaacatgcacaaaatgtggtggttctgggaagactgtgaaggaattctgcaagacatgcagaggaaacaaagttgtgcctggaacgaaatcagtccaccttgacatactggctggttcggataatgaggatactataaaggttgttagatcaggtggagaagacccagacggccgtccaggtgatctttatgtgaccctcaaggttcgtgaggatcctgtattccgtagagaaaaaggtgatattcatgttgatgctgttctgaatgtgactcaggcaattttgggagggacagttcaagtcccaactcttagtggagacgttgttctaaaggtcaaacctggtactcaacctggtcagaaggtagttctgagaggaaaagggatcaaggcaagaaactcaccatactatggagatcaatatgtccatttcaatgtcaccatccctatgaatttgacaccaagacagcgggtgctgattgaggaattcgcgaaggaagagcaaggcgaagatgagaaggacgcgaaggcagccggggcatcaggatagcctattttaggagccaatccacattccaatagtgccttagctgatctttataccgtgaggtagaataggctgctgcctgaaattcgcaggcaacatatagctggttgcatggaatactggaatttccaccgcaacatatagatctttgtttgggattttgtagctggaataatactagatcgcccgtgcctgatatgttcaatcctaagcctaatgctagcagggcgtgcaaggactcttgtacaattttgttgatcagggtgaccagatgtaaaaacacacggtaccaatgccaattcatgttttctgtcgaggttttggctttt

SEQ ID NO: 4301 - DNA, 1681 bp, Oryza sativa Japonica Group
acttcttaagccgcaagcacgcgacgcgacggcgaggccacacgacctcacctcgccaccatgcggctccccggcgacgctcgcctcgccctcctcctcgctcgccgccgcgccctcccctcctcctcgcccgccgcgtcggcgtcccccttccacggctcgcgcgcccacggagcgaggtggggcgacgcgtttcgcgccgcggctcccgcgtggaggtcgccgttctcctcgccgactagtgccaggctcttccacgggacgaggccggtggcagcgagggactactacgatgtgctcggcgtgagcaggaacgcgagccagggggagatcaagaaagcgtattacgcgcttgcgaaaaagctccatccggatacaaataaaggtgattctgatgcagagaggaagtttcaagaggttcagcgagcttatgagactttgaaggatgatcagaagagatcattatatgatcaggttggccctgatcagtatgagaaagcttccgctggaggaggacctggtggtgcatatgaagggggttttggcaatccgtttgaggatatttttggtggaggtggcggcggcggtggaatgaatgatttctttagaaacatattcagagagagagaatttagcgggcatgatgccaaggttgcacttgaaatatcatttatggaagcagttcaggggtgcacaaagacgatcaattttcagactgctgttacatgtgacacctgcaagggagctggcgtaccccctggaaccaaacctgaaacttgcctagcctgcaggggttcaggatttatcttcatgcaaactggtcccttcaggatgcaatcaacatgcacacagtgtggtggtagtgggaagactgtgaaggaattctgcaagtcatgcaaaggaaggaaagttgtgccaggaacaaaaaacatccgactcaacatagtgcctggtacggatgatggtgacgttataaagttggttagatcaggtggagcagatccagatggtggtagtcctggtgatctttatgtaactctgaaggttcgtgaggatccggtatttcgaagagagaaaggtgatattcatgtagatgctgtattgaacgtgactcaggcaattttgggcgggacagttcaggttccaactctctctggagatgtagttctaaaggtcaagcctggtactcagcctggccaaaaggtggttctgagaggaaaaggaatcaagacgagaaattcatcgtactatggagatcagtatgtccacttcaatgtcaacatccctgcgaatttgacaccgagacagcgcgtgctgatcgaggaatttgcgaaggaagagcaagctgaagaggagaaagacgcaaaggcagcaggagcatcgggatagctgattttaggagcgacccgtacatttgattagtgctttagtctcatcatatatcgcgagatagaataggctgctgcctgaaatttgcaggggcaagaagatatagtttggttggatgcatggaattttacatgccgacatatagcagtttcaaattttgtagctgggaataatatacaccacgccgcctgatgtttgcaatctcctaatgtcactagcatcagtgagacaggcggcaggatcctgtattgtataattttgtgtgttaagaaagtatggaactcacggtacc

SEQ ID NO: 4302 - DNA, 1299 bp, Sorghum bicolor; identical to SEQ ID NO: 1095

SEQ ID NO: 4303 - DNA, 1284 bp, Zea mays
tttcaactgtctgcccctgatgtccgttggctcccgacggaggccgccgccgccgcatcaccaccggcgcgccatgacacctgcctcctccgtctccgtccccgcgccggttcccgcgccccctaagcctctctacctccggggcccggtcatcgcaggcgccgtcgcgctggccgcgtttctcctcctcgccgccgcctacgccaccaggcgagcagggtccccgccggccgccctcctctcccacccagctgtttccaccaggttcttctccttcgacctggtgcgcgagtaccctcacgacccggccgccttcacccagggtatcttgtacgcgggaaatgacacgcttttcgagtccactggcctctacggcaggtcttcagttcgaaaggttgagcttcagaccggaaaagttttggttaaccaccaaatggacggagatgtgtttggagaaggtttaactcttcttggtgacagattgtttcaggttacctggttgaagaacgacgggtttatatatgaccggcataacttctccaaatgcacgagttttacccataaaatgcgagatggttggggtctggcgactgatggaaaagttctttttggcagtgatggcacctcaatgctgtataagctggattcaaagtcacttgaagtcatgaaagtggtgactgtcaagtatcacggtaatcaagtcccctatcttaatgagctggaatatatagatggtgaagtctgggcaaatgtctggcagacagattgcatagctagagtgtcccctgaagatggcctagtggtgggttggatctttcttcatgagctgaggcggcagttgtggaactcaggcaacacgaatattgacgtcttaaacgggatagcttgggatgaaagaaggcacagattatttgtgacagggaaactgtggccaaagctatatgagatcaagctacgggcagtagatggtccagcagatggatctgtagaaaagctttgtccaaaagccagcttctatcgctgaagagtgtagaaccgcatatacactgggtgtgctaacatgggccttcatttgtttaaacgcacgatgcgaaggatgtggagatgtgagtacgtacatgtttgatctggtaccactgtcatatatatatacacccatgagttagtagatgtagctgtacattgttgtgacctgtatgaattttgatgatggctgtgttgtttgtgttaagagtgaattgcaacagattttgatgcattcaatgcaacttaatagcttgaagg

SEQ ID NO: 4304 - DNA, 1321 bp, Zea mays
gtgggcgtggacacgttgactttttcaactgtctgcccctgatgtccgttggctcccgacggaggccgccgccgccgcatcaccaccgtcgcgccatgacacctgcctcctccgtctccgtccccgcgccggttcccgcgccccctaagcctctctacctccggggcccggtcatcgcaggcgccgtcgcgctggccgcgtttctcctcctcgccgccgcctacgccaccaggcgagcagggtccccgccggccgccctcctctcccacccagctgtttccaccaggttcttctccttcgacctggtgcgcgagtaccctcacgacccggccgccttcacccagggtatcttgtacgcgggaaatgacacgcttttcgagtccactggcctctacggcaggtcttcagttcgaaaggttgagcttcagaccggaaaagttttggttaaccaccaaatggacggagatgtgtttggagaaggtttaactcttcttggtgacagattgtttcaggttacctggttgaagaacgacgggtttatatatgaccggcataacttctccaaatgcacgagttttacccataaaatgcgagatggttggggtctggcgactgatggaaaagttctttttggcagtgatggcacctcaatgctgtataagctggattcaaagtcacttgaagtcatgaaagtggtgactgtcaagtatcacggtaatcaagtcccctatcttaatgagctggaatatatagatggtgaagtctgggcaaatgtctggcagacagattgcatagctagagtgtcccctgaagatggcctagtggtgtgttggatctttcttcatgagctgaggcggcagttgtggaactcaggcaacacgaatattgacgtcttaaacgggatagcttgggatgaaagaaggcacagattatttgtgacagggaaactgtggccaaagctatatgagatcaagctacgggcagtagatggtccagcagatggatctgtagaaaagctttgtccaaaagccagcttctatcgctgaagagtgtagaaccgcatatacactgggtgtgctaacatgggccttcatttgtttaaacgcacgatgcgaaggatgtggagatgtgagtacgtacatgtttgatctggtaccactgtcatatatatatacacccatgagttagtagatgtagctgtacattgttgtgacctgtatgaattttgatgatggctgtgttgtttgtgttaagagtgaattgcaacagattttgatgcattcaatgcaacttaatagcttgaagaaaaaaaaaaaaaaaa

SEQ ID NO: 4305 - DNA, 1292 bp, Oryza sativa Japonica Group
aagtggtgaaaaacacacaagagagaaaagaggaaaataagcagaaagagatgccccggcggagggccctgcctcctcaccgtcgcgccaccgccaccgccaccgccatgcctcccgccaacctctccatctccgccccctccgccgccgccgcaccaccgcccccgctttacctccgccgcctcccgctcatcgccgctgccgcgctcctcttcctccttgtcatcgtcgtcctcgctgctgcccatccctacggctacgctccatggctagccaacgccgcaccagcagccctcctccgccgcccggtatccacaaccttctactcttttgacctgctccgagaatatccccacgatccatacgcctttacccagggtctcttgtatggaggaaatgacacttttttcgagtcaactggcctttatcacaggtcatcggtccggagggttgatcttaaaactggaaaagttttagttcagcatgaaatggatggacgattgtttggagaaggtctcacgcttctcaatgacaaattgtttcaagttgtttggatgaagaatcaggggtttatctatgatcgacataactttagcaaacgtgagagttttacccataaaatgagtgatgggtgggggttggctactgatggaaaagttctttttggcagtgatggtacttcaaggttataccagcttgatccaaagtcaattcaagtcatgaagacagtgactgtgaaatatcaagataatgaagtcccctatcttaatgaactggaatatataaacggtgaagtatgggcaaatgtctggcagacagattgcatagctagagtctcccatgaagatggcctagtggtgggctggatctttcttcatgagctgaggcaacacttgtggaattctggcaatacggaaatcgatgttctaaatggtatagcttgggatgaagaaaatcaaagattatttgtgaccggaaaattgtggccaaagatctatgaaattaagctacggcctgtagatgggccacaagatggatctgtagagaagctatgccccaaggcaagcttttatcgttgaggtgtagtggatctctctagggtgagaagagaagagaagagaagagaagatataggatatcttgtttttatatcagtatgttacaatgcacagatgtattgcatacacctcttaagtggaggtaattgattggcagttttcggagacttgtgttgtatctcgacaaaattgagtgtatttactgatctgatggtagctacttgcttcgtcttc

SEQ ID NO: 4306 - DNA, 1552 bp, Zea mays; identical to SEQ ID NO: 1096

SEQ ID NO: 4307 - DNA, 1188 bp, Sorghum bicolor
atgatccaccttcggaagcgcatcgtctccctcctcccccggacaccaacccgcgtcccttgcccccacaactccccgctcttctatccccaccgccttctctccgccaccaaatgcgtcgctacaactacaaaccagttcgccgtcgaggactacctcgtcgccacctgcggcctcacccgagcacaggcgctcaaggcgtcgttgagaatctcccatctgaaggacgcctcgaggcccgacgcggtcgtggccttcctctccaacctcggtctctccagcgccgaggtcaccgctgtcgtcaccagggaccccaaggtcctctgctccgacgtggaacgaaccctcaccgcccgcgtcgccgagctcaccgacctcgggctgtcacgtccggagatcatccgcctcctcatcgttggcatgaaccacttccgccacggctcgcttcgcctcaatgttgagttttggatctcggtctttggctccctagacgagctcatgcgggtgctcagaattaacaacgttctcctcagcaaaaacattgagaaggtgtgcaagcccaacttggcgctcattcagaaatgtggtatagatgtttctgagatccccaaaagcttcatgtcccgggtgctcaccgtggaccctaagaggctgctggaagctttggctcaccttcatgagtatagaatccagcagggctcgcaattgttcatccgcgggctctatacatttgcgatccttggcagtgagaagataaccaagaggatacagctgtttgagaagcttggatggtcaaaggatcatatagtatcagcggtaaagagtgacccaaatatattgggtttcaccgaggaaagggttcgaagaagcatggaattcttgatcggggtcgttggattggaggtacaatacattgcacaaaggccagcactgataacttgtagcattgaccgacggttgctgccacggaactgtctgatgaattttctcagggcaaaggggctgttcaatgacaagcctaccttcttttctgttgcctctttaagcgataagaaatttcgacgtcgatacgtgcatccttacgaggagagatttccaggccttgctgctgcttttgcttctagcagtgctggagaacaccaatgggaacggctatataagatgacaggcgaaaatagagagagctga

SEQ ID NO: 4308 - DNA, 1178 bp, Zea mays
gtcgattcgagttccgctcgccttcgtcttcgtctcgacccacggcccacggcccacggtccatcagcgttcgtcctcccttcctctagcgcctgctgcctctctcactccatggcgtggatctggatggtcctcgcggcgggagccgtgctcctgtgggcgatctctttggggcgggtcctctcctccgccgcgccgtcctgtgtgccctcgagcccgcagttcatgccccctctcagcggtgacaggaggagccggaacgtgctgctggtcgtcgcccaccccgacgacgagtccatgttcttcgctccaaccattcttttcctcaagtcgaaaggccacagtattcacattctgtgcatgtctcgaggtaatgctgatggtctgggagatactcgtaaggaagaattgtaccacgcctgtgtcagcctcaagattccacatgaacaagtcaaagtcttggaccacccaaaattgcaggatggatttcatgagaaatgggaccatggactagtagcagaacttaccatggagcatgtccaactgtgggccattgacacgattgttacatttgattcatatggagtatcaggtcatccaaaccacaaagatgttcatcacggcatatgcaagtttctccatacgaacaggcaagggaacgtggaagcttgggaactagcaagtctcagtattcttcgcaagtacagtggtccgattgacatttggctttcttcattgacgtccttcgcatggacaaaacagccaatctatactctagttaacagtagcccgtccagaagctatgaggcaatggctgcacacagaaagtcagtgggtttggtttagaagattgtttgtcatgttctcgagttatwcatacatwaatatgctacggagaatttaacatgtgatgtggcgtcataccatgataccagagcaagccgccattgtcgtctccaatgttgtacttgtgcatcgtcaattgtacatctatatgtatcactggattttagttgtacattctctatagacagtgctcatagggtgactgtagaatttcttttccccaatccagaattgcactgaatggctgaaatacagttgtctttcaaaagaaactgaaatacagtgatgctcactggcttagcttatgggtatgggcaaaaaaaaaaaaaaaa

SEQ ID NO: 4309 - DNA, 1232 bp, Zea mays; identical to SEQ ID NO: 1097

SEQ ID NO: 4310 - DNA, 1112 bp, Sorghum bicolor; identical to SEQ ID NO: 4293

SEQ ID NO: 4311 - DNA, 3703 bp, Sorghum bicolor
atggatttgtccaggttcgcctccggcgtcgggcccagccgcgcggcccctcgggcgggcctgcagatcggcgccgccgggaatggcttccggccctgcacccagcggcgagcgcggcaccgcggcggcggcggcgggtacgggagcctcacgtccaccgccgccgccgccgccctccgcggccgcggcgggctcttctacctggctcccacgcgcgggagccctcctctcagtctccgcgccagagggcggccgccgcggtgccagggcaacgactcattggcctacgtcgacggccccttggaggccgccaaggactccggcgaggtcaccgacgaggaggccaccagctcggggtccgacgacgagaggggccccggccccgccgacgtcgaccgtctcagggagatgctgcaccggtccaggaacgagctggaggtggccaggctcaacagcaccatgttcgaggagaaggcgcagcggatatccgagtcggccatcgcgctcaaggaccgcgccgacggcgcccagagggacgtgtctgcggccgttgccactgtgcaggagattatcggcaaggaggcggacgccaaggaggccgttcaaaaggctaccatggcactgtcgatggccgaggcgaggctgcagctggcagcggaggcgctggaggcgaagcggggctcggtcgggccaatggaggttagcatcgaaggcgtggaggaggaggcccttgtgtctgcgcaggaagagattaaggattgccggatggccctgtcacggtgcgaggaggagctgggacgtgtccaggacaagaagatggagctgcagaaggaggttgataggctgacggagctcgcagagaaggcccagttggacgcgtccaaggccgaagaagatgttgccaatataatggtgttggctgagcaggcggtggctcttgagatggaagctgcacagcgtgtcaacgatgcggaaatgttgctggggaaagcggagaaggccatatcctcagttgacactgtggtggagctaacgtcatctgctgaagagcagaaaagcactgaagaagatagcatttctgaagggtacgagtatagcagtgatgccaccgatgatgtttctgtgagggatgaggtgtcaagtatcgagcgtctaatggttggtgacttgactgttgagggcattgagcagcttgaaccatcccgtgagatatatgatgaagcaagcagtgataagacgtctgttgagcctcagaaagaggctgagcctgattcagataagtcaaagcaagggaagaagcaggaaatggaacgaaaggaggtcaccaaggaaccactgagtgctccaaaagcactggtgaagagatcatcccgcttcttcccggcatctttcttctcctccaaagttgatggagagtttacgcctacatcagtctttcgggggttaatgaaatcagtgcaaaaacaggttccgaagcttgttgttgggatattgcttcttggttcaggggcattcttcttaaatagagctgagaagagtcaactatttcagcagcaaggcattgccacaagcattggaaaggtaacctccacaacaaagcccatagttcgtgagatacggcaaattccacagagagtaaagaagctaatagagctcttacctcatcaagaggtaaatgaggaagaagcttcgctttttgacatactgtatttgcttctggccagtgttatttttgtaccattatttcagaaaatccctggaggcagtcctgttcttggatatcttgctgctggtgtcctcattggtccatatgggctctccatcatccgtaatgtgcacgggacaaaggcaattgcggaattcggagtcgtgttcttactatttaacattggacttgagctttctgtggaaaggctaagctcgatgaagaagtatgtcttcggcttgggatctgctcaggtgctggctactactgcagctgttggtatgatagctcatcgttttgctgcactaccagggccagcagcaatcgttgttgggagtgggttggctctgtcatccacagctgttgtcttacaagtattgcaagagcgtggtgaaagtacgtcacgtcatgggcgcgctacattttctgtgttattgttccaggatttggctgtggtggttctgttgatattaatacctctcatatcacctaattcttcaaaaggaggggttggtttccaagcaatagcagaagccatgggaatggctgcagtcaaagcagtagctgctataactgccataatgtctggaggccgtctgttgctccgtcctatttacaaaataattgctgaaaatcggaatgccgagatattttcagcgaatacactccttgttatttttggcacaagtcttcttacagcccgggctgggttatcaatggcacttggagcttttttggctggcctgttactagcagaaacggagttctccttgcaggttgagtcagatatagctccgtatcgtggtcttctgttaggacttttctttatgacggttggaatgtctattgacccaaagctgcttctgtcaaacttcccagcaatctctgtgatattgggtctcttgatatttggaaaaacattgttggttacatttgtcggcagggtgtttggggtttctactatagctgctattcgtgttggcctcttgcttgcacctggtggtgagtttgcttttgttgcctttggagaagctgtcaatcagggtcttctatcacctcaattatcatcgttgctatttttagtcgttggcatttcaatggctctgacaccatggttagctgctggggggcagtttctcgcatcaaaatttgagcagcatgatgtgaggagtttattgcccgtggaaagtgagactgacgatttgcaagaccatattattatattaggctttggacgtgttgggcagatcattgcgcaactcctgtcagagcggttaatcccttttgttgcacttgatgttagaagcgatcgggtagcagttgggcgtgcacttgaccttccagtgtattttggggatgctggaagcagagaggtactgcacaaagttggagctgaaagagcttgtgctgctgcaattactttggatactcctggtgcaaactacagagctgtctgggcattgagcaaatatttcccaaatgtgaagacatttgttagagcacatgacgttgatcatggtgttaatttggagaaagctggtgcaatggcggttgtccctgagaccttggagccaagccttcagctagctgctgctgttcttgcacaagcaaaacttccaatgtcagagattcaggaaaccatcagcgagttccggaatcgacatctgtcagagcttacagagttgtgtgctacgacaggaagttctcttggctatgggttttccagagttacgtccaaatcgaagtctgtcacccccgatgatgaaagcgaaacagtggatggtgcactagctatttgatgccgattagataaaatgggaccccttgatagtactagattgattgcactgttcagtagataatcttgttgcatgtagaaagagtggaataataattcatgcaagagctgtcataaaagttggcgtgcaattttgtatgttagaatatacttatatatacccttctgttgccagctatttagcctaaaaaattgtttgc

SEQ ID NO: 4312 - DNA, 4263 bp, Oryza sativa Japonica Group
gctctcctgccctgcctcgtctcctccgctcagctcagctccggtccaaaccaaaacacacacacaacataagaggcggcggccctaacaaatcccaagagacttccactgcacaaccaacctagagcagctttgagacttgagagtgagagctcgcgagtcgcgcacagactcaaacagaggcagagagagatgggaagggaatgaggcggcggctcctctccccttctccggtgacgtgacgacgcccctctcctcctcctccgctgccgcatccgagttcataaaccttcgtcccttccgccccgccatccgtcttcccggaatcccgggggcgcgtggggatggatttgtctaggtttactgccccgcggccgggcttgcagatcggcgccgccgggaatggcttccgggcatgctccctgcggcgtctcaggtatcgtgtctgcggcgggaaccccatgggcgcctccgccctcggaggctgcggttcccgtagcctcttctacttggctccaaaccatgggagccctcttgccctccggaccagagggagggcgctgaggtgccagggaaatgactcactggcctatgttgatggccctttggaaggtaccaatggctcagtagtcgataataccgaggacgaagcaaacagctctgggttggatgaggagaagggtgatgatgatgcagaaaatctcagggacttgcttcagaaggcgaggaaagagctggaggtggccaggttgaacagcaccatgttcgaggagaaggcgcagcggatatccgagtcggccatcgcactgaaggatagggcagataaagctcagagcgacgtctcttctgccgtgacgaccatacaggagatcatcagcaaggaggctgatgccaaggaggctgtccggacagctacaatggcgctctccatggctgaggcccgcttgcagttggcgtcagaagctctggatgccaaaaggggatcagtcgggccgatggaagttagcattgatgatgtggaggaggaggcccttgcgtccgcgcaagaggagattaaggagtgccaagaaagtctgtcaaaatgtgaggaggagctgagacgtatccaagagaagaaaatggagttgcagaaggaggttgatagattgacggagcttgctgagagggctcttttggatgcttcaaaagctgaggaggatgttgcaaatataatggttttggctgaacaggcagtagctcttgagatggaagctgcacagcgagcaaatgatgcggaactagcattgcagaaagcggagaaggccatctcctcggttgatgccgtcgtagagttaccagcacctgctgaggagcaagtaagtgatgaagaagacaatgtttctgaagtgtatgattacagcagtgatgctatagatgatattcctgaaagagacgaggtgtcaaatgttgagcgcctaactgttggggacttagctgtagaaggcattgagcaacttgaatcatcccgtgaaatgtctgatgacgaaagcactgacaagttgcttgttgagcctcagaaagaagccgaacctgatatagataagtcaaagcaagggaaaaaacaggaaatagaacgaaaggagtctcagccatcgaatgctcctaaagcatcactgaagagatcatctcggttcttccccgcatctttcttctcctccaaagcggatggagaatttacacctacatctgttttcaaggggttgatgaaatcgactagaaagcatgcgccaaagcttgttgttgggatagtgcttcttggagcaggagcattcttcttaaatcgggctgagaagagtagtcaattatttcagcagcaagaaataaccacaagtattgaggaagttacctccactgcaaagcccatagttcgtgagatgcgaaagatcccacaacgagtaaaaaagcttattgagctcttacctcatcaagaggtaaatgaggaagaagcttcactcttcgacatattatatttgcttctggctagtgttgtgtttgtaccattatttcagaaaatacctggaggtagtcctgttcttggatatctggctgctggtgtcctaatcggtccctatgggctttccatcatccgtcatgtccatggaacaaaagcaattgctgaatttggagttgttttcttgttgttcaacattggccttgagctttctgtggaaaggctaagctcaatgaagaagtatgtctttgggttaggctctgctcaggtgctggctactacagcagctgttggtatgatagctcaccgttttgcagtgctaccgggaccagcagcaattgttattgggagtgggttggctctgtcctcaacagctgttgttttgcaggtactacaagaacgtggggagagcacatcacgacatggacgtgctacattttctgtgttattattccaggatttggctgtggtggtcctgttgatattaatacctcttatatcacctaattcttcaaaaggaggggttggtttccaagcaatagcagaagctatgggaatggctgctgtaaaagcaatagctgctataacagccataatcgctggaggtcgtctgttgcttcgtccaatttacaagcaaattgctgaaaataggaacgctgagatattttcagcaaatactctccttgttatttttggaacaagtcttctcacagctcgggctggattgtcgatggcactgggagcatttttggctggtctattgctagcagaaacagaattctccttacaggttgagtcggatattgctccttaccgtggtcttctgttaggtcttttctttatgacggttggaatgtctattgaccccaagttgcttctgtcaaacttcccagcaatctctgtgatattaggtcttttgattattggaaagacaatgttggttacatttattggtagagtatttggaatttccaccatagctgctgttcgggttggtctgttgcttgcacctggtggggagtttgcttttgttgccttcggagaagctgtcaatcagggtcttctatctcctcaattatcgtcattattatttctagtggttggcatttcaatggctcttacaccatggttagctgctggtggccagtttttggcatcaaaatttgagcagcatgatgtgagaagtttattacctgtggaaagtgagacggatgacttgcaagaccatattataatattgggatttgggcgtgttgggcagataatcgcacaactcctgtcagaaagattaattccatttgttgcacttgatgttcgaagtgatcgggtggcagttggacgcgcgcttgacctaccagtatatttcggggatgcaggaagtagagaggtactgcacaaagttggggctgagagggcctgcgcagctgctattactttagatacccctggtgcaaattatagagctgtctgggctttgagcaaatattttccaaatgtgaagacattcgtccgagcgcatgatgtggatcatggtgttaacttggagaaagctggtgcaacagcggttgtccctgagaccttggaaccaagtctccagttggctgctgctgttcttgcacaggcaaaactcccaatgtcagagattgcagcaactgtcaatgagttcaggaaccgtcatctgtcagagctcacagagttatgtgctacaagtggaagttctctgggctacggatactcgagagtcatgtccatttccaaatcaaagaccgtcacctctgatgatgagagtgaaactgttgatggagcattggcgatttgagctgatgcgttagtcacctcccttagactgtacagtagataatctgtcatcaaagataatttgcgtatagaaaagtagtagcaaaataattcacgcaatgacgattcccatttttgaaaacttagcattacccctttttttaatgtatggtaggacataggatattacttatcttctaccatcagttcatttatttgtagcccttttactccgttagcaagtaatttcttgatggagaactaggacgatgcttgcaccttacatggagaacactgagaatttcacaagtggcctccaaatggcgcatgatggataagtcgtagtcgtctcttatgaggaatccatacaaccaagattttgggttcagaactaaatattatgattttgttagtactcagagctgatgttggaaacaagtggtgtcgggtttcttttgatattgcattatattttt

SEQ ID NO: 4313 - DNA, 3910 bp, Hordeum vulgare subsp. vulgare
ggcgccccctctcctgacaaaccctctctcccccttgcttcttccgcccgtctccaaccccacggccgcccccgccgttccattggtacagcaggggatggatttgtccaggttcgcgtctccgcggcccccgggcctgcagcagatcggcgccgccgccttccgcgcccggggcgcctgctcgctgcgccggccccgccaccgcgggaacctcacggtcgcctcggccctccgcggcgcaaccggcctcttctacgccgccgccgccccaaaccacgcccgtctccggctcagacggcggtgccagggcaacgactcgctggcctacgtcgacggcccgctggagggcaccaagggcagcagctccagcgccgccgaggccgtcgacgacgccgcggggtccgacggcgatgagagggcccgcagcgccgcagccgcggtcgacgtggacggcctcagggacctgctgcagaaggccaggaaggagctggacgtggcccggctcaacagcaccatgttcgagggcaaggcgcagcgcatatccgagtcggccatcgcgctcaaggaccgtgccgacagcgcgcagaccgaggtgtcttccgccgtggccaccgtgcaggagatcatcagcaaggaggacgacgccaaggaggccgtccgcaaggccaccatggcgctctccatggccgaggcccggctgcagctcgccgcggaggctctggacgccaagaggggatccgtcggccagctggaggtcagcctcgacgacgtcgaggaggaggcgctcgcgtccgcccaggaggagatcaaggggtgccaggccagcctgtcaaaatgcgaggaggagctggggcggatccaggggaagaagatggagctgcagaaggaggttgacaggctgaccgagctcgccgagagggctctcctggacgcctccaaggccgaggaggacgtttccaacataatggtgttggctgagcaggccgtggctcttgagatggaagcggccaagcgcgcgaacgacgcggagctggcgttacagaaggcggagaaggcggttgagtccgttgtggagctggtgccggctgccgatgggcacatgagtgacgaagaggacgatctttctgatgtttacgactacagcggtgacggtatgcttgacatttctgaaagggacgaggtgtcggatgtcgagcgtttgatgcagattggcgatttggctgctgaaggcattgagccgcttgaaccgtctaatgaaatgcctattgaagaacgcactgacaagttgcttgttgagcctcagaaagaagctgaacctgacgtagttaagccaaagcaagggaagaagcaggacacagaaaggaaggagtcttccaaatcatcgttgaagaggtcgtctcgtttcttctcggcatctttcttctcctccaaatccgatggagagtttacacctacatctgtattccgagggctaatgatatcagccagaaaacaagcaccagctcttgttgccgggatactgcttattggtgcgggggcatttttcttcaatagagctgagaagagtagtcaattgtttcagcagccaggcatagccaccactagtattgaagaagttacctccactgcaaagcccgtatttcgtgagatacgtcagttaccacaaagaataaagaagctaatcgcgctcttacctcatcaagaggtaaatgaggaagaagcttcgctttttgacgtactatacttgctgcttgctagtgttgtttttgtgccattattccagaaaatacctggaggcagtcctgttcttggatatcttgctgctggtgtcctcattggtccctatggtctttctatcatccgcaatgtccatggaacaaaggcaattgctgaatttggagtcgtgttcttgttattcaacattggccttgagctttctgtggaaaggttaagttcgatgaagaagtatgtatttggattaggctctgctcaggtgttggttactacagcagttgttggtctggcagctcaccgttttgcagcactaccaggaccagcggcaattgttgttgggagtggtttggctctatcatccacagctgtcgtcttgcaagtactacaagaacgtggggagagcacatcacggcatggacgtgccacgttttctgtgctacttttccaggatctggccgtggtggttctgttgatattgatcccactcatatcacctaattcttcaaaaggaggggttggtttccaagcaatattggaagctatgggaatggctgcggtaaaggcaatagctgctataactgccatcattgctggaggtcgtttgtttcttcggccaatttacaggcaaattgctgaaaatcggaatgctgagatattttcagcaaatactctccttgttatatttgggacaagtcttcttactgctcgggctggcttatcgatggcactgggagcatttttggctggtttgttgttagcagaaacagagttctccttacaggttgagtcggatattgctccttaccgtggccttctattaggtctattctttatgacggttggaatgtccattgatccaaagctgtttctttcaaacttcccagcaatctctttgatactaggtctcttaattatcggaaagacactgttagtaacatttattggtagagtatttggaatttccaccatatctgctgtccgggttggacttttgcttgcacctggtggggagtttgcttttgttgccttcggagaagctgttaaccagggtcttctatcacctcaattatcgtcattattatttttggtggttggcatttcaatggctatgacaccatatttagctgctggaggccagtttctagcatctaaatttgagcagcatgatgtcaggagtttattgccagtggaaagtgagacggatgacttgcaaggccatattattatattgggatttggacgtgttgggcagatcatcgcccaactcctgtcagaacggttaattccatttgttgcgcttgatgttcgaagtgatcgggtagcagttgggcgtgcacttgacctaccagtatatttcggtgatgcagggagcagagaggtactgcacaaagttggagctgagagggcatgtgctgctgccattactttagatactcctggtgcaaattatagagctgtatgggctctgagcaaatactttccaaatgtgaagacatttgtcagagcacatgatgttgatcatggtgttaatttggagaaagctggtgcatcagcggttgtccctgagaccttagaaccaagtctccaattggctgctgctgttcttgctcaagcaaaacttccaatgtctgagattgcaacaacgatcaacgagttcaggaatcgtcatttgtcagaactcacggagctttgttctacaagtgggagctccctgggctatggcttctctcgagtcatgtcaaaaacgaagcctctggtctccgacgacgagagcgaccccattgatggagccctggcaatctgagcccaatacacaaacgtaaaaggctcctcccaggactgtacagtagatgtgttcgcgcatagaaaggtagcaaagctaataatccgagcaaacactgttaccgatctttggcaacatttcagctcttccattttggtatggtaggacatttgtttcttttctcttccaaaccatggcttcttcttttctgtttccagcccctttacttcccgtcaagtagacggtggaagatttggctgtcagggttgcacgcaggacactgagaattttgcagaaagtgtccgccattttgcgtgtgctgttctactccactcttatgaaagttcttgattttctttcttcacaaaagttgagaaaagtattgcatcttcc

SEQ ID NO: 4314 - DNA, 3943 bp, Hordeum vulgare subsp. vulgare
gaagcgccccctctcctgacaaaccctctctcccccttgcttcttccgcccgtctccaaccccacggccgcccccgccgttccattggtacagcaggggatggatttgtccaggttcgcgtctccgcggcccccgggcctgcagcagatcggcgccgccgccttccgcgcccggggcgcctgctcgctgcgccggccccgccaccgcgggaacctcacggtcgcctcggccctccgcggcgcaaccggcctcttctacgccgccgccgccccaaaccacgcccgtctccggctcagacggcggtgccagggcaacgactcgctggcctacgtcgacggcccgctggagggcaccaagggcagcagctccagcgccgccgaggccgtcgacgacgccgcggggtccgacggcgatgagagggcccgcagcgccgcagccgcggtcgacgtggacggcctcagggacctgctgcagaaggccaggaaggagctggacgtggcccggctcaacagcaccatgttcaagggcaaggcgcagcgcatatccgagtcggccatcgcgctcaaggaccgtgccgacagcgcgcagaccgaggtgtcttccgccgtggccaccgtgcaggagatcatcagcaaggaggacgacgccaaggaggccgtccgcaaggccaccatggcgctctccatggccgaggcccggctgcagctcgccgcggaggctctggacgccaagaggggatccgtcggccagctggaggtcagcctcgacgacgtcgaggaggaggcgctcgcgtccgcccaggaggagatcaaggggtgccaggccagcctgtcaaaatgcgaggaggagctggggcggatccaggggaagaagatggagctgcagaaggaggttgacaggctgaccgagctcgccgagagggctctcctggacgcctccaaggccgaggaggacgtttccaacataatggtgttggctgagcaggccgtggctcttgagatggaagcggccaagcgcgcgaacgacgcggagctggcgttacagaaggcggagaaggcggttgagtccgttgtggagctggtgccggctgccgatgggcacatgagtgacgaagaggacgatctttctgatgtttacgactacagcggtgacggtatgcttgacatttctgaaagggacgaggtgtcggatgtcgagcgtttgatgcagattggcgatttggctgctgaaggcattgagccgcttgaaccgtctaatgaaatgcctattgaagaacgcactgacaagttgcttgttgagcctcagaaagaagctgaacctgacgtagttaagccaaagcaagggaagaagcaggacacagaaaggaaggagtcttccaaatcatcgttgaagaggtcgtctcgtttcttctcggcatctttcttctcctccaaatccgatggagagtttacacctacatctgtattccgagggctaatgatatcagccagaaaacaagcaccagctcttgttgccgggatactgcttattggtgcgggggcatttttcttcaatagagctgagaagagtagtcaattgtttcagcagccaggcatagccaccactagtattgaagaagttacctccactgcaaagcccgtatttcgtgagatacgtcagttaccacaaagaataaagaagctaatcgcgctcttacctcatcaagaggtaaatgaggaagaagcttcgctttttgacgtactatacttgctgcttgctagtgttgtttttgtgccattattccagaaaatacctggaggcagtcctgttcttggatatcttgctgctggtgtcctcattggtccctatggtctttctatcatccgcaatgtccatggaacaaaggcaattgctgaatttggagtcgtgttcttgttattcaacattggccttgagctttctgtggaaaggttaagttcgatgaagaagtatgtatttggattaggctctgctcaggtgttggttactacagcagttgttggtctggcagctcaccgttttgcagcactaccaggaccagcggcaattgttgttgggagtggtttggctctatcatccacagctgtcgtcttgcaagtactacaagaacgtggggagagcacatcacggcatggacgtgccacgttttctgtgctacttttccaggatctggccgtggtggttctgttgatattgatcccactcatatcacctaattcttcaaaaggaggggttggtttccaagcaatattggaagctatgggaatggctgcggtaaaggcaatagctgctataactgccatcattgctggaggtcgtttgtttcttcggccaatttacaggcaaattgctgaaaatcggaatgctgagatattttcagcaaatactctccttgttatatttgggacaagtcttcttactgctcgggctggcttatcgatggcactgggagcatttttggctggtttgttgttagcagaaacagagttctccttacaggttgagtcggatattgctccttaccgtggccttctattaggtctattctttatgacggttggaatgtccattgatccaaagctgtttctttcaaacttcccagcaatctctttgatactaggtctcttaattatcggaaagacactgttagtaacatttattggtagagtatttggaatttccaccatatctgctgtccgggttggacttttgcttgcacctggtggggagtttgcttttgttgccttcggagaagctgttaaccagggtcttctatcacctcaattatcgtcattattatttttggtggttggcatttcaatggctatgacaccatatttagctgctggaggccagtttctagcatctaaatttgagcagcatgatgtcaggagtttattgccagtggaaagtgagacggatgacttgcaaggccatattattatattgggatttggacgtgttgggcagatcatcgcccaactcctgtcagaacggttaattccatttgttgcgcttgatgttcgaagtgatcgggtagcagttgggcgtgcacttgacctaccagtatatttcggtgatgcagggagcagagaggtactgcacaaagttggagctgagagggcatgtgctgctgccattactttagatactcctggtgcaaattatagagctgtatgggctctgagcaaatactttccaaatgtgaagacatttgtcagagcacatgatgttgatcatggtgttaatttggagaaagctggtgcatcagcggttgtccctgagaccttagaaccaagtctccaattggctgctgctgttcttgctcaagcaaaacttccaatgtctgagattgcaacaacgatcaacgagttcaggaatcgtcatttgtcagaactcacggagctttgttctacaagtgggagctccctgggctatggcttctctcgagtcatgtcaaaaacgaagcctctggtctccgacgacgagagcgaccccattgatggagccctggcaatctgagcccaatacacaaacgtaaaaggctcctcccaggactgtacagtagatgtgttcgcgcatagaaaggtagcaaagctaataatccgagcaaacactgttaccgatctttggcaacatttcagctcttccattttggtatggtaggacatttgtttcttttctcttccaaaccatggcttcttcttttctgtttccagcccctttacttcccgtcaagtagacggtggaagatttggctgtcagggttgcacgcaggacactgagaattttgcagaaagtgtccgccattttgcgtgtgctgttctactccactcttatgaaagttcttgattttctttcttcacaaaagttgagaaaagtattgcatcttccattagcctctattctgaagatgctttgttcc

SEQ ID NO: 4315 - DNA, 1234 bp, Sorghum bicolor
acacaggtctctctacctactcgcctgcccgccgcccggtgctctcgtccgctcgcgcatcgcctccttccggttccggaaccttctcctccgggctccctccggctagatgttccttcccaagcatccgagttcttcccgtccatggcgcccctcccttcaaccaggcgctcatctcattcgccctcgcccccgcatcccggcgacgacatcgtcaggacggaggcacctccttcggccgtcggccgctgcctcctccggctctccgtccagagattccccactcccagtccctcccgcgaagcggtcatcaaagaataaggcgccggatgaaatcgggaggtcgaaggcggtgcggccaggaatgcgcgagtccgctggccctgaaactgaaactgaggatccatcaccgcagcggacggccctgtggtcggcgaggcggagggcgcgcgctgcgtggcggaaggtggcgtcttgggtgcccagcaaggcccggagtctcgtactactcaacctggtcacccttatatttgctagcaacatttcagttgtgaaacaggcggaggctcttttggaccctgaccttttcaatatgttaaggttcactatagcagccatcccttttgtgccgctgttactaaaatcgctgagggatatgcaaatcctttttagaggaatagagttgggcatttgggtaagcttggcctacctggctcaggctatggggttagttacagctgatgctgggcgcgcatctttcatttctgcactcactgtgatcattgtccctttcttggatggtcttattggagcagaagtacctgctcatacatggtttggagcatttttatcacttcttggtgttgctatgctggagctaagtggttctccgccatgtattggtgatcttctgaaccttgtgagcgctttttcttttgcaattcatatgctcagaactgagcatatttccaaaaatataaaggaagaaaatttcttaactcttgttggatgtgaggtggctgctatgcgtgatgtatcagctacagaaactgcaattatttatggtctggaacctgtatggggtgctgcttttgcatgggcaatgctcggtgagagatggggcacgacaggatttgtcggggctatcttgatcatagctggcagcttgatggttcagatatttggagcaatccctgatgtatctagaggagacaattatcagatgaacagttaa

SEQ ID NO: 4316 - DNA, 1631 bp, Zea mays; identical to SEQ ID NO: 1098

SEQ ID NO: 4317 - DNA, 2947 bp, Zea mays
gtcccagccagccagccagccctctcgtcccggattgcgctcgaagcaagcggccgcccgaggcgaggcgaggcgtgcgcgcgccgcgagacgatggacttcggcgacgacgtcatggacggcggctccgatgcccagcgccgcaagaagagataccaccgccacacaccgcgccagattcagcagctcgaggcgatgttcaaggagtgcccgcacccggacgagaaccagcggatgcagctgagcagggagctggggctggagccccggcagatcaagttctggttccagaaccgccggacgcagatgaaggcgcagcacgagcgccaggacaactgcttcctgcgcgcggagaacgacaagatccggtgcgagaacatcgccatgcgggaggcgctccggagcgtcatctgccccacctgcggcggcccgcccgtcgccgacgactacttcgacgagcagaagctgcgcatggagaacgcgcgactcaaagaagagcttgaccgggtgtccagcctgacgtccaagtacctggggcggcccatcacgcagctgccgccggcgcaggcggcgctgtccatgtcgtcgctggacctgtccgtcggcgggctcggcagcccgtcgctggacctcgacctcctcagcggcggctcctcggggtatcccccgttccacctcccgatgtcggtgtcggagatggagcggcccatgatggccgagatggcgacgcgcgccatggacgaactcatcaggatggcgcaggccggcgagcacctgtgggtcaaggcgggcggccgcgaggtgctcaacgtcgacacgtacgacagcgtcttcgccaagcccggggccgcctcgttccgcggccccgacgtgcacgtcgaggggtcccgcgactcgggcctggtcttcatgagcgccgtcggcctcgtcgacatgttcatggactcgagcaagtggacggagttcttccctgccatcgtgtccaaggcgcgcacggtcgacgtcctcgtgaacggcatggccgggcggagcgagtctttggttctgatgtacgaggagctgcacgtgatgtcgccggtcgtcccgacgcgcgagttctgcttcctgcgctactgccggcagatcgagcgcgggctgtgggcgatcgcggacatctcggtggacctgcagcagcacgacgcgaggttcggcgcgccgccgtcgcgatcatgccgcctcccgtcgggatgcctcatcgccgatatggccgacggctcctccaaggtgacatgggtggagcacatggagatcgaggacagggttcccatccacctgctctaccgcgacctcatcctcagcggcgccgcgctcggggcgcaccggtggctcgccgccctgcagagggcgtgcgagcggtgcgcgtgcctcgtcccggccggtatgccgcaccgggacattgcagttgcaggagtgacgccggaagggaaacggagcatgatgaagctgtcgcagcggatggtgagcagcttctgcgcgagcctgagcgcgtcgcagctccaccggtggacgacgctgtcggggcccagcgacgtgggcgtccgcgtcacggtgcaccgcagcacggacccggggcagcccagcggcgtggtgctcagcgcggccacgtccatctggctgccggtcccgtgcgaccgggtgttcgccttcgtccgcgacgagcacaggcgctcccagtgggacgtgctgtcgcacgggaacccggtgcaggaggtgtcgcgcatccccaacggctcccacccagggaactgcatctccttgctcagaggcctgaacgcgagccagaacagcatgctgatcctgcaggagagctgcaccgacgggacggggtcgctggtggtgtacgcgccgatcgacatcccggcggccaacgtggtgatgagcggcgaggacccgtccgcgatcccgctcctgccgtcgggcttcaccatcctgccggacgggcggcccggcgcgccgtcgtcctcgagcgccggcggcccgctggtgggctcccccgcggcggcggggtcgctggtgacggtggcgttccagatcctggtgagcagcctgccgtcgtcgaggctgaacgccgagtcggtggccacggtcaacagcctcatcagcaccactgtggagcaaatcaaggcggccttgaattgtgccagccattgatggagccccggctgatggatccatggaatttggtgcgggcgtgcgtgcgtgcatgcatgcgcgcgcgttggtctcggtctcctctcctctcgtcccccagccggccgcctgccgcctgcctggtggctgctgcgaggagtgaattcccttcaaggcgttggttcgcgacggagctcttggttggtcgggggggcttcaatgctggctggccattcaaggaggcgggggctgctgccatggtgtcgcccgcttggggttcacctgccgctgttactgcgccgtccgatcaccggcccatgatcattcagctctgtctctctctctctacctctacccctttctctgcatgcatgataacttttcctgttacaggatttgaagcttgcttgccggcgaggctttgcacgaaacgggggagtcaagaacgcaccatgctcgtctcattcctcttgctgccgtcacgctcatcagttgttaattccattcctctttgtgtctcccctcccctagtttctgccgccgatttgcagtctcgctcccattctgtagtttgcagcagaggatgatgcatggttcgggtattgacttctatctaatggtgtgaagccttcaatgatcattaattctctccttctttttagtaagggaaatgtcactgtcactgctttgattgttccttttcattctttcctctctctcactgtttaatccttcaatatgatcaatgggcgggttattttaaaaaaaaaaaaaaaaa

SEQ ID NO: 4318 - DNA, 2124 bp, Sorghum bicolor
atggacttcggcgacgacgtcatggacggcggctccgacgcccagcgtcgcaagaagagataccaccgccacaccccgcgccagattcagcagctcgaggcgatgttcaaggagtgcccgcacccggacgagaaccagcggatgcagctgagcagggagctggggctggagccccggcagatcaagttctggttccagaaccgccggacgcagatgaaggcacagcacgagcggcaggacaactgcttcctgcgcgcggagaacgacaagatccggtgcgagaacatcgccatgcgggaggccctccgcaccgtcatctgccacacctgcggcggtccgcccgtcaccgacgactacttcgacgagcagaagctgcgcatggagaacgcgcggctcaaggaagagcttgaccgggtgtccagcctgacgtccaagtacctggggcggcccatcacgcagctgccgccggtgcagccgctgtccatgtcctcgtcgctggacctgtccgtcggcgggctcggcagcccggcgctgggcccgtcgctggacctcgacctcctcagcggcggctcctccgggtaccctccgttccacctcccgatgacggtgtcggagatggagcggcccatgatggccgagatggcgacgcgcgccatggacgagctcatcaggatggcgcaggccggcgagcacctgtgggtcaagacggcgggcggcggccctgacggtcgcgaggtgctcaacgtcgacacgtacgacagcatcttcgccaagcccgggggctcgttccgcggccccgacgtgcacgtcgagggctcccgcgactcgggcctcgtcttcatgagcgccatcggcctcgtcgacatgttcatggactcgagcaagtttacggagttcttccctgccatcgtgtccaaggcgcgcacgatggacgtcctcgtgaacggcatggccgggcggagcgactctttggttctgatgtacgaggagctgcacatgatgtcgccggtcgtcccgacgcgcgagttctgcttcctccgctactgccggcagatagagcacgggctatgggcgatcgcggacatctcggtagacctgcagcagcgcgacgcaaggttcggtgcgccgccatcgcgctcgtgccgcctcccgtcgggatgcctcattgctgatatggccgatggctcctccaaggtgacctgggtcgagcacatggagatcgaggacagggttcccatccacctgctgtaccgcgacctcatcctcagcggcgccgcgttcggggcgcaccggtggctcgccgcgctgcagagggcgtgcgagcggtgcgcgtgcctagccacggccggcatgccgcaccgggacattgcagctgcaggagtgacgccggaagggaagcggagcatgatgaagctgtcgcagcggatggtgagcagcttctgcgcgagcctgagcgcgtcgcagctccaccggtggacgacgctgtcggggcccaacgatgtgggcgtccgcgtcatggtgcaccgcagcacggacccggggcagcccagcggcgtggtgctcagcgctgccacgtccatctggctgccggtcccgtgcgaccgggtgttcgccttcgtccgcgacgagcacacgcgctcccagtgggacgtgctgtcgcacggcaacccggtgcaggaggtgtcgcgcatccccaacggctcccaccctggaaactgtatctccttgctcagaggcctgaacgcgagccagaacagcatgctgatcctgcaggagagctgcaccgacgcgtcgggctcgctggtggtgtacgcgccgatcgacatcccggcggcgaacgtggtgatgagcggcgaggacccgtcggcgatcccgctcctgccgtccggcttcaccatcctgcccgacgggcggcccggcgcatcgtcgtcgtcgtcgagcgctgccggtggcacgctgggcgcgacggcggcggccgggtcgctggtgacggtggcgttccagatcctggtgagcagcctgccgtcgtcgaagctgaacgccgagtcggtggcgacggtcaacagcctcatcagcaccactgtggagcaaattaaggcggccttgaattgcgccagccattga

SEQ ID NO: 4319 - DNA, 2866 bp, Hordeum vulgare subsp. vulgare
gggacctcgatcctagcaccaccaccgctcgttgagccaccaccagtcgccgggattgggatttgggattgcgcgcgctcgaagcaaacgacgtgggaagccgacaagaggccgaggagcgaggcaggcaggcgccgggaagcgggaagccgggggggccatggacttcggcgacgacctcgcgccgggctccgacgcccaccgccgcaagaagcggtaccaccgccacaccccgcgccagattcagcagctcgaggcgatgttcaaggagtgcccgcacccggacgagaaccagcggatgcacctcagccgggagctggggctggagccgaggcagatcaagttctggttccagaaccgccggactcagatgaaggcgcagcacgagcgcgccgacaactgcttcctccgcgcggagaacgacaagatccgctgcgagaacatcgccatgcgcgaggcgctcaagaacgtcatctgccccacctgcggcggcccgcactccggcgccgacgactacttcgacgagcacaagctccgcatggagaacgcccacctcaaagaagagcttgaccgggtgtccagcctgacgtccaagtacctggggcggcccatcacgcagctcccgtcgatgcagccgctctccatgtcgtcgctggagctctccgtcggcgggctcggcagcccggtggctctcggccccgcgctcgaccttgacacgctcggcgggagctccccgttccagctcccggcgcccgtgtcggacatggagcggccgatgatggcggagatggcgacgcgggccatggacgagctcatcaggctggcgcaggccggcgagcacctctgggtcaagacagcgggcggacgagaggtgctcaacgtcgacacgtacgacagcatcttcgccaagcccgggagcagctcattccgcggcccggacgtgcacgtcgagggctcccgcgactcttgcctcgtgctcaccaccgccatcggcctcgtcgacacgttcatggactcgagcaagtggacggagttcttcccgaccgtcgtgaccagggcgcgcacgatcgacgttctcgtgaacggcatggccggccggagcgagtctttggtgcttatgtacgaggagctgcacgtgatgtcgccggtcgtcccgacgcgcgagttttgtttcctccgctactgccggcagatagagcagggactgtgggcgatcgccgacgtctcggtggacttgcagcgggacgcccgctacggcgcgccgccggcacgatcgcgccggctcccctcgggctgcctcatcgccgatatgtccaatggctattccaaggtgacctgggtggaacacatggagacggaggacaagacccccatcaaccagctctaccgcgacctcgtcctgagcggcgcggcgttcggcgcgcaccggtggctggcggcgctgcagagggcgtgcgagcggcatgcgtgcctcgtgacgccgccgcacagggacatcgccggggtgacgttggagggaaagaggagcatgatgaggctgtcgcaacggatggtgggcagcttctgcgccagcctgagcgcgtcgcagcagcaccggtggacgacgctgtcggggcccggcgcgggcgtggacgaggcggcgggcgtgcgcgtcatggtgcaccgcagcacggaccccgggcagccgagcggcgtggtgctcagcgccgccacctccatctggctccccgtgccctgcgaccgggtgttcgccttcgtccgcgacgagaacacgcgctcccagtgggacgtgctctcgcacggcaacccggtgcaggaggtgtcgcgcatcccgaatggctcgcacccggggaactccatctccttgctcagaggcctgaacgcgagccagaacagcatgctgatcctgcaggagagctgcgcggacgcgtcggggtcgctggtggtgtacgcgccgatcgacctcccggcggcgaacgtggtgatgagcggcgaggacccatcggcgatcccgctgctgccgtcgggtttcaccatcctgcccgacggccgcgcgtccagctcggggtcggtggtgacggtggcgttccagatcctggtgagcagcctgccgtcgtcgcggctgaacgcggagtcggtggccacggtcaacagcctcatcggcaccactgtggagcaaatcaaggcggccctcaactgcggcggcagcagccattgatgagcctgccctccgtcagcgggagcgagtaagagctccccctccccttcatttccattcaaggcgaaccggggcttcggttggttggagccttgaatgaatgcctcgcgcattcatggagatggaggagctagctcgccgtggtggtggtgtcgctcggtcggggttcatcctctgcggccgccgctgtcacagcgccgtccggtcgctggatcggcgcccactcgcccacgccgtcgtcttcttcttccacgcttggttaggtatctagtctagctgctgccacgatgatctcttggtttgcagggtcgtcgtcgtcgtcaagttacttacgtttggactttgcatgcatgcacgcacgcatgcacgagcacgtctcggtctcgaagtggaggctttgcatgagcccgaaggagtcaagaacgcaccatgcttgtcccgttcctctcgctgcggccgcgtactatcgccatcttcatctttctttcattttttttcaccattttcttcttcttcttcttctccacccccttttgatcctcctccatggtgtagccgcagcagaggatgaatggttcgggtattgacttctgtccatcaatgtaaaagcctccaatcaattaatgaacattcagattttttttttcc

SEQ ID NO: 4320 - DNA, 3066 bp, Oryza sativa Japonica Group
atggatttcggcgacgaacccgagggctccgacagccagcgccgccgcaagcgctaccaccgccacacgcctcgccagattcagcagctcgaggcgtacgcgttttctctatttttttttctgctgttgttcttctatgtgttgttggctttcgtccgccatggcggcggcgccatggatggagggatgaaatggtgcgtgtgtttgtttcccgtgttgtgcaggatgttcaaggagtgcccccacccggacgagaaccagcgggcgcagcttagccgggagctcgggttggagccgaggcagatcaagttctggttccagaatcgccggacccagatgaaggtaaattacaaggagaattccgattggttttcttgattgatcgatcgatcgccatggattccggcgtgcgtgcttgcttccttccgttcgtttcttgcggggaggatgatgatatccatggtgtggggtttgctgtttgcaggcgcagcacgagcgggcggacaactgcttcctccgcgccgagaacgacaagatccggtgcgagaacatcgccatccgcgaggccctcaagaacgtcatctgccccacctgcggcggccctcccgtcggcgaggactacttcgacgagcagaagcttcgcatggagaacgcccgcctcaaggaagaggtaatgccccgcctccgccgccgccgccgccgccgtcgacgacgcggtttgctttgctttgttgatgtttctgatgatgtgttttgttgcggtgttcgtccggcgaacgtgcgagcagctggaccgcgtgtcgaacctgacgtcgaagtatctcggccggccgttcacgcagctgccgccggcgacgccgccgatgacggtgtcgtcgctggacctgtccgtgggcgggatgggcgggccgtcgctggacctggacctcctcagcggtggctcgtcggggatcccgttccagctgccggcgcccgtgtccgacatggagcggcccatgatggccgagatggccacgcgcgccatggacgagctgatccgcctcgcgcaggccggcgaccacatctggtccaagagccccggcggcggcgtgtccggcggcgacgcccgcgagaccctcaacgtcgacacctacgacagcatcttctccaagcccggcggctcgtaccgcgcccccagcatcaacgtcgaggggtcccgcgagtccggcctcgtgctcatgagcgccgtcgccctcgccgacgtgttcatggacacggtaatcaagctgttcgacgccacaaccattctccattttgctcatttgattgattggttcatcgccatcgcagaacaagtggatggagttcttcccaagcatcgtgtccaaagctcacaccattgatgtgctcgtgaatggcatgggagggagaagcgagtccttgattctggtaaacccacattgccattgccattgccattgcatcaatcgagcaaattcttttgtgagttttttccattttgatcttgtgatgtttgtgttgtgggtgtagatgtacgaggagctgcacatcatgacgccggccgtcccgacccgggaggtgaacttcgtccgctactgccggcagatcgagcaggggctatgggccatcgccgacgtctccgtcgacctgcagcgcgacgcccacttcggcgcgccgccgccgcgctcccgccggctcccttcggggtgcctcatcgctgacatggccaatggctactccaaggtatacgcgatggacaatgtgccgcacgcaatggtgttttggtttcggctcgctgacgacgtcgcgcacgctcgcgtacgcgcaggtgacctgggtcgaacacatggaggtggaggagaagagcccgatcaacgtgctgtaccgtgacctcgtgctgagcggcgccgcgttcggggcgcaccgctggctcgccgcgctccagcgcgcgtgcgagcgctacgcctccctcgtcgcgctcggcgtcccgcaccacatcgccggtggtatgcacccgtcgagcgctcgacatcacagtcgtcgttgcgtttttctctcgccatgacactgacattgtccgggctcgccatggttgggcacgcagtgacgccggaggggaagaggagcatgatgaagctgtcgcagcggatggtgaacagcttctgctcgagcctgggggcgtcgcagatgcaccagtggacgacgctgtcgggctccaacgaggtgagcgtccgcgtcaccatgcaccggagcacggaccccggccagcccaacggcgtcgtcctcagcgccgccacctccatctggctccccgtcccctgcgaccacgtcttcgccttcgtccgcgacgagaacacccgctcccaggtcagccatccactctctccgccattgatatcgctcactcactcactgtgcccgccattgctgctgctgcagtgggacgtcctgtcgcacggcaatcaagtccaggaagtgtcgcgcatccccaacggctcaaacccggggaactgcatctcgctgctaagagtaattagccctaattaaccctctccatgatcgcatctccaaaccttaaacctcgaaatgccatgctgcggcgagtttaatgcgattacgtcgttaatggcgtcgtctcgatctgcagggcttgaatgcgagccagaacagcatgctgatactgcaggagagctgcacggacgcgtcggggtcgctggtggtgtactcgccgatcgacatcccggcggcgaacgtcgtgatgagcggtgaggacccgtcgagcatcccgctgctgccgtcggggttcaccatcctccccgatggccgcccgggctcggcggcgggggcgtcgaccagcagcgcggggccgctcgccgccgcgcgcggcgggggcggcgggggcgctggcggcgggtccgtcgtcaccgtcgcgttccagatcctcgtcagcagcctgccgtcgtcgaagctcaacgccgagtctgtcgccaccgtcaacgggctgatcaccaccaccgtcgagcagatcaaggccgcgctcaactgctccgcccatggccaccaccc

SEQ ID NO: 4321 - DNA, 2103 bp, Sorghum bicolor
atggatttcggcgacgaacctgagggctccgacagccagcgccagcggaagcgctaccaccgccacaccccgcgccagattcagcagctcgaagcgatgttcaaggagtgcccgcaccccgacgagaaccagcgcgccgcgctcagccgggagctcggcctggagccacgccagatcaagttctggttccagaaccgccgcacccagatgaaggcgcagcacgagcgcgcggacaactgcttcctccgcgcggagaacgacaagatccggtgcgagaacatcaccatgcgcgaggcgctcaagaacgtcatctgccccaactgcggcggcccgccggtcgccgaggacttcttcgacgagcagaagctgcgcatggagaacgcccgcctgaaagaagagctggaccgggtgtcgagcatcacgtccaagtacctcggccggccgttcacgcagatgccgccggtgccgaccatgtccatgtcgtcgctggacctgtccatgggcgggatgcccgggcagcagggccacctcggcgggccgccgtcgctggacctcgacctcctcagcggctgctcgtccgggatgccgtaccagatgccggcgcccgtgacggagatggagcgccccatgatggtggacatggcgacgcgcgccatggacgagctcatccggctcgcccaggccggcgaccaaatctgggtcaagggcatgcccggggacgccagggagatgctcaacgtcgccacctacgacagcctcttctccaagcccggcgtcgcgttccgcccgccggacatgaacgtcgaggggtccagggactcgggcctcgtcttcatgagcgccgtcgcgctcgtcgacgtcttcatggacaccaacaagtggatggagttcttccccggcatcgtgtccaaggcgcagaccgtcgatgtcctcgtgaacggcttgggcgggaggagcgagtccttgatcatgatgtacgaggagctgcacatcatgacgccggtcgtcccgactcgcgagctgagcttcctccgctactgcaagcagatcgagcaaggtctgtgggccatcgccgacgtctccctggacgggcagcgcgacgcccactacggcatgccgtcccgctcccgtcgcatgccgtcggggtgcctcatcgccgacatgtcaaatggctactccaaggtgacctgggtcgaacacatggagatcgagcagatgctcccgatcaacgtcctctaccgcaacctcgtgctgagcggcgccgcgttcggggcgcaccgctggctcgccgcgctgcagcgtgcgtgcgagcggttcgcgtccgtggccaccctcggcgtgccgcaccacgacatcgccggagtgacgccggaggggaagcggagcatgatgaagctgtcgcagcggatggtgggcagcttctgcgcgagcctgagctcgtcgccgctgcagcggtggacgctgctctccggcaccacggacgtgagcgtccgagtgtccacgcaccgcagcaccgactccggcggccagcccaacggcgtcgtcctcagcgccgccacctccatctggctgcccgtccccggcgaccacgtgttcgccttcgtccgcgacgagaacgcgcgctcccagtgggacgtcctgtcgcacggcaatcaggttcaggaggtgtcgcgcatccccaacggctccaaccccggcaactgcatctccctgctgagagggctcaacgcgaaccagaacagcatgctgatcctccaggagagctgcacggacgcgtcgggggcgctggtggtgtactcgccgatcgacatcccggcggcgaacgtggtgatgagcggcgaggacccgtcgggcatcccgctcctgccgtcgggcttcgccatcctccccgacggacgcccggggtccggcgcgggcgcgtccagcagcgtcgtcctcccgctcgcgtcgcagccgggctgcgtggtcaccgtcgcgttccagatcctcgtcagcaacctgccgtcgtccaggctcaacgccgagtccgtcgccaccgtcaacagcctcatcggcaccaccgtccagcagatcaaggccgcgctcaactgcgccggcccttga

SEQ ID NO: 4322 - DNA, 2046 bp, Zea mays; identical to SEQ ID NO: 1099

SEQ ID NO: 4323 - DNA, 1836 bp, Oryza sativa Japonica Group
tgattcaggggtgtctggtaattacctctctctgcggcgtcttgcagtttggctagctgagcctgcggtgaggatgcgcctaatggcggttttggttgatggatgccggggtttgagaggtggcgcaatggctggtgcgatccatgggcacgcacagcatggggatcccaccttccaggattttatgggccgcttgctgcggcgggtgtgctcaccgctgtttgaaatggtccgaagctgggtgttagaaggggagttggaggatgtgtttgcagaattcttcattgttgggcagccagtcaaggctgagtctctgtggcaggagggctatcttcttcagtctgatatgcttccagctttcatttctccagtactggcgcaaaggattcttagaaccgggaagtcaatcaactttcttaaagtttgctgtgatgataatggttgggcagatgctgctactgaggctgctgtctgtgttggcaccacaactagtcgaggtgggcttggttatgggcagattgatgctttggaggcactagtggttgaagcagccaagaggattgatcggcatttgatggatgtgatccataagcggtatcgattcaaagatcattgtcttgcgattaagaggtatttgcttcttgggcagggtgacttcgtccagtatctgatggatgttgttggccctgagttgtcagagccagcaaataggattagctccttccatttggctgggttgcttgagactgcgatccgagcatctaacgctcaatatgatgaccgtgacatcttggatcgcataaaggtaaagatgatggatcatggagatggtgatcgtggctgggatgtgttttccttggagtatgatgctagggttcctctggatacggtattcacagcttctgtcatgaagaggtacctcaagatttttaacttcctgtggaagcttaagcgtgtagaccattcattgactggaatctggaagacaatgaagcctaactgcattgtttcatctccattttacaaggagggaacaaacatcaggtctcagtttgtttcagttcttcgcaaatgccaagttctatttaatgaaatgaaccactttgtgaccaacttccagtactacattatgtttgaggtcctggaagtttcctgggctcgtttctcagaagaaatggattcagcaaaggatttagatgatcttctgttggcacatgataagtatctcacatcgattgtggagaagtctctccttggtgagagatcacatggaattctgaggaatctttttgcactttttgacatcattttgcaattccggagccatgctgatcggtggtttgagcggatatatgagttgcaactgaggggaaagggtaagccaaaatcaaaagcaaaagctaaatccaaggaagtggattcatgggtggatggtgggaggaaagccatgattcagctggctggggaacttttccggaaaatgggtgaagatttggatagcatcgcgaaagattatacttcttcacttgatgcatttatcgctcagttacctatgcaacagcatgttgatttgaaattcctactcttccgcttagacttcactgaatactacagtcgtgtttcgtctaacaaatgaagatgtgttcctgatgtggaaaaagtagggagttagatttactctttggtttggggtttgtgaggcattcttttgtacaccttagccctgctgattgatatttggtcatttgaaaggcatggtctgccactttcatttgtcctgaacctcctgttgaattcaccctttaaggtaacttctagggccaatacaactatcct

SEQ ID NO: 4324 - DNA, 2024 bp, Sorghum bicolor
atgggtagctataacccggtgggtaattacccattgccatctttactccgaacaaacctcaatatcatcatctcgtccacttccactccgcggttccacatctcgcaaaaattcaaacaaattttgcgctctcaacactgcgtcaatccgctccaagccagccccgaccggagcaatggcttccgccaaggagacctatcgcgccgagctccgcgccgccgcccgccagcttggagagcgctgcctctactccgccgctaaatgggccgccgagctgctcgtcggtgtagagccggatgcggccccggtcccgtcggccgtgatggacaccccttcctcctcgtccgcgacctccgcggggcggctattgcacctgcaccgtagtgggggttccagcttccgccaccgcccccgccccgctggcggcggcactagctcggaggccgggacccctctcggtggcgtgtcgtacgtcagcacgcccatccccgacgacgatgcgttcgattcgggcggcgacaagtacctgctggccaagacctatttcgactgtcgggagtaccgccgcgctgcgcatgtgctgcagaagcaggtcgggcgtaaggctgtgttcctgcgatgctacgcgctctacatggctggagagaagcggaaagaggcagagatgatagagcttgaaggatcgttgggcaagagtaatgctgttaatcaggaactaattgctttggagaaagagctctcaacacataaaagaactggatctattgattcgtttggactctacttgtatggcattgttctacgtgataaaggatgtgaaggtctagctagaacgatcttggtagaatctgtcaatagctatccttggaactggagtgcttggtcagagttacaatctttatgtaccagcagtgacattttaaacaagttaaatctgaagaatcactggatgaaagacttctttcttgctagtgcatatttggaactaaagatgcatgaagaagctcttaaaagatatgaacgcttgatgggggtcttccgctgcagtggttacattcaggctcaaattgcaacagttcagtacagtatgagggaccttgatgaagctgagatgattttcgaagatctgctcaggactgatccttttcgtgtggattctatggatatttactcaaatttactatatgcaaaagaaagcttgactgctttgagtttccttgcgcacagagtatttttgacagataaataccgcccagaatcttgctgcataattgcaaattactacagtctgaagggtcagcatgagaaatcagttttgtactttcaaagggcactaaagcttaatcgaaagtacctctcagcttggaccctgatggggcatgagtatgttgaactgaagaatactcctgctgcaattgatgcctacagaagagctgttgatattaatcctagagatttccgtgcttggtatggtcttggtcaaatctatgagatgatggggatgccgttttatgcacttcattacttccggaaatcgtcatacttgcaacccaatgatgctcgtctctggattgccatggctcagtgttacgaaagtgatccacttcaaatgattgaagaagccatcaagtgctatgagagagctgcagatagcaatgacactgaaggaatagcacttcaccaactagcaaaattgcatggaatgctggggcaatctgaggaagctgcgttctactacaagaaggatttagagagaatggaggttgaggaaaggcaaggccagaatgttgttgaagctctgctgttccttgctaagtataacaagagcataggcaagtttgaggaagcagaggactattgtacaaggcttttggattacactggcccagagaaggagactgctaaaaatctgttgcaagggataaaaaggttacagtcaggatttccatcaatgaatactgatcattttgcactgtaaactgtaaagtccacctgcagataagttatttggttgggaaaattgg

SEQ ID NO: 4325 - DNA, 1945 bp, Zea mays
cacggttccacgtatcgcaagaattcaaataatttttgcgctctcgcgtcgatctgcttcaagcaagccccgaccggagccatggcttccgccaaggagagctatcgcgccgagctccgcgcctcctcccgccagctcagcgagcgctgcctctactccgccgctaaatgggccgccgagctgctcgtcggcgtagagctggatgcggccccggtcccttcggccgcgatggactccccatcctcctcgtccgcagcctccgcggggcggctattgcaccttcaccgtagcgggggttccagcttccgccaccgaccccgccccggcggcggcagtagctcggaggccgggaccccgctcggtggcgtgtcatacgtcagcacgcccatccccgacgacgacgcgttcgattcgggcggcgacaaatacctgctggccaagacctatttcgactgtcgggagtaccgccgcgccgcgcacgtgctgcagaaccaggttgggcgtaaggcagtgttcctgcgatgctacgcgctctacatggctggagagaagcgaaaagaggcagagatgatagagcttgaaggatcgttgggcaagagtaatgctgttaatcaggaactagttgctttggagaaagagctctcaacacaccgaagaactggctctattgattcatttggactctacttgtatggcattgttctacgtgataaaggatgtgaaggtctagctagaacaatcttagtagaatctgtcaatacttatccttggaactggagtgcttggtcagagttacaatctttatgcaccagcagtgacattttaaacaacttaaatctgaagaatcactggatgaaagatttctttcttgctagtgcatatctggaacttaagatgcatgaagaagctcttaaaagatatgagcgtttgatgggggtcttccgctgcagtggttacattcaggctcaaattgcaacagttcagtacagtatgagggaccttgatgaagctgagatgattttcgaagaactgctcaggactgatccttttcgcgtggattctatggatatttactcaaatctactatatgcaaaagaaagcttgactgctttgagtttccttgcgcacagagtatttttgacagataaataccgcccagaatcttgctgcataattgcaaattactacagtctgaagggtcagcatgagaaatcagttttatactttcaaagggcactaaagcttaatcgaaagtacctctcagcttggaccctgatggggcatgagtatgttgaattgaaaaatagtcctgctgcaattgatgcctacagaagagctgttgatattaatcctagagatttccgtgctttgtatggtcttggtcaaatctatgagatgatggggatgccgttttatgcactttattacttccggaaatcgtcatacttgcaacccaatgatgctcgtctctggattgccatggctcagtgttacgaaagtgatccacttcaaatgattgaagaagccataaagtgctatgagagagctgcaaacagcaatgacactgaaggaatagcacttcaccaactagcaaaactgcatggcatgctggggcaatccgaggaagctgcattctactacaagaaggatttagagagaatggaggttgaggaaaggcaaggccagaattttgttgaagctctgctgtttcttgctaagcattacaagagcataggcaggtttgaggatgcagagcactattgtacaaggctcttagattacactggcccagagaaggagactgctaaaaatatgttgcaagggataaaaaggttacagtcaggatttccatcaatggatattgatcattttgcactgtaaactgttaagtccacccgcaggtaaattatttggctgcgaaaattggacattaagtgtgtcatgt

SEQ ID NO: 4326 - DNA, 2245 bp, Zea mays
aattcaaataatttttgcgctctcgcgtcgatctgcttgaaccaagccccgaccggagccatggcttccgccaaggagagctatcgcgccgagctccgcgcctcctcccggcagctcggcgagcgttgcctctactccgccgctaaatgggccgccgagctgctcgtcggcgtagagctggatgggaccccggtcccttcggccgcgacggactccccatcctcctcgtccgcggcctccgcggggcggctattgcaccttcaccgtagcgggggttccagcttccgccaccgaccccgccccggcggcggcagtagctcggaggccgggaccccgctcggtggcgtgtcatacgtcagcacgcccatccccgacgacgacgcgttcgattcgggcggcgacaaatacctgctggccaagacctatttcgactgtcgggagtaccgccgcgccgcgcacgtgctgcagaaccaggttgggcgtaaggcagtgttcctgcgatgctacgcgctctacatggctggagagaagcgaaaagaggcagagatgatagagcttgaaggatcgttgggcaagagtaatgctgttaatcaggaactagttgctttggagaaagagctctcaacacaccgaagaactggctctattgattcatttggactctacttgtatggcattgttctacgtgataaaggatgtgaaggtctagctagaacaatcttagtagaatctgtcaatacttatccttggaactggagtgcttggtcagagttacaatctttatgcaccagcagtgacattttaaacaacttaaatctgaagaatcactggatgaaagatttctttcttgctagtgcatatctggaacttaagatgcatgaagaagctcttaaaagatatgagcgtttgatgggggtcttccgctgcagtggttacattcaggctcaaattgcaacagttcagtacagtatgagggaccttgatgaagctgagatgattttcgaagaactgctcaggactgatccttttcgcgtggattctatggatatttactcaaatctactatatgcaaaagaaagcttgactgctttgagtttccttgcgcacagagtatttttgacagataaataccgcccagaatcttgctgcataattgcaaattactacagtctgaagggtcagcatgagaaatcagttttatactttcaaagggcactaaagcttaatcgaaagtacctctcagcttggaccctgatggggcatgagtatgttgaattgaaaaatagtcctgctgcaattgatgcctacagaagagctgttgatattaatcctagagatttccgtgctttgtatggtcttggtcaaatctatgagatgatggggatgccgttttatgcactttattacttccggaaatcgtcatacttgcaacccaatgatgctcgtctctggattgccatggctcagtgttacgaaagtgatccacttcaaatgattgaagaagccataaagtgctatgagagagctgcaaacagcaatgacactgaaggaatagcacttcaccaactagcaaaactgcatggcatgctggggcaatccgaggaagctgcattctactacaagaaggatttagagagaatggaggttgaggaaaggcaaggccagaattttgttgaagctctgctgtttcttgctaagcatcacaagagcataggcaggttcgaggatgcagagcactattgtacaaggctcttagattacactggcccagagaaggagactgctaaaaatatgttgcaagggataaaaaggttacagtcaggatttccatcaatggatattgatcattttgcactgtaaactgttaagtccacccacaggtaaattatttggctgcgaaaattggacattaagtgtgtcatgtgtggccgcacatacgctaggcgcagacgcgcctgtgacgtacgccgcgcggctgagtgcgccgagcgggcgctgcatgagccatcgcctagtggctggaaggaaacttagagtagtaagctgttttggtaattcctagaattaaggagagctgttttggtaattccttgaattaaggagaatcttctccagtcggttatggtagttcctagaattaaggagatccttctccattcggttaagccattggctatatatatttgtaatcgtgtgacagaagggggggaagaaatcagttatctccaaaaaaaaaaaaaaaaaa

SEQ ID NO: 4327 - DNA, 2719 bp, Oryza sativa Japonica Group
agcagcagcaccaccaccaccgcttcgtccgccccgtgccccaacggccgacgctgctgcacggcacggcccccggccgaatctgccgtgcgcgggttggcacagtggcacacgcccaaattccatccctcccgtccctagccggttcctctccttcctccccccctcgcaaaaattcaaaaaaaagcttgcgctcctcccgtcctccggcgccgatctgctcgaaggaggccacccccaacctccccgaccaaaccaatggcttcctccaacgaaacctaccgcgtcgagctccgagccgccgcccgccagctcggcgagcgcggcctctactccgccgccaaatgggcggccgagctgctcgtcggaatcgagcccgacgcgacgccggccccgtcgtcggtgatggacaccccttcctcgtcgggctccgccgcatccgggggccgcctcctgcacctccaccgcagcggcgggtccagcttccgccgccgcctccgcccgggcgcggccgaggccgggacgccgctcggcggcgtctcgtacgtcagcacgcccatccccgacgacgacgcgttcgacgtggggggtgataggtacctgctcgccaagacctacttcgactgccgcgagtaccgccgcgccgcgcacgtcctgcgcggccagaccggccgcaaggccgtgttccttcggtgctatgccctgtacacggctggagagaaacggaaagaggaagaaacagtcgagcttgagggatctctgggcaaaagcaatgctgttaatcaggaactagttgcattggagagagagctcgcaacacatcggagaactggtgctattgattcattttgtttgtacttgtatggcattgttctacgtgataaaggcagtgaagctctagctagaacagttctggtggaatctgtcaacagctacccttggaactggagtgcttggttagagttacaatctctctgcactagcagtgacattttgaacaacttaaatatcaagaatcactggatgaaagatttcttccttgctagtgcacatctcgaattaaaaatgcatgaagaagctttgaaaagatatgagcgcttaatgggggttttccgttgcagtgactacattcaggctcaaatagctaccgtgcagtatagtatgagagacctggatgaagctgacatgatttttgaagaactccttaggactgatcctttccgtgtggattctatggacgtttactcaaatttattgtatgcaaaagaaagctcgactgctttgagtttccttgctcacagagtatttttgacagataaatatcgcccagaatcttgctgcataattgcaaattactacagtttgaaggggcagcatgaaaaatcagttctgtactttcaaagagcgctgaagcttaatcgaaagtatctttcagcttggactcttatgggacatgagtttgttgagctaaaaaatacacctgctgcgattgatgcctacaggagagctgttgatataaatcccagagattaccgtgcttggtatggtcttggtcagatctatgagatgatgggaatgccgttttatgcagtttattacttccgtaagtcatcatacctacaacctaatgatgcccggctttggaatgctatggctcagtgctatgaaagtgatcaactccagatgattgaagaagccatcaagtgctatgagagatctgcaaataataatgacaccgaaggaatagcacttcatcagctagcaaagttacatggtatgcttggacaatcagaggaggcagcattttactacaagaaggatctagagagaatggaagttgaggaaaggcagggccagaattttgttgaagctctgcttttccttgctaagcattgcaagagcataggcaggtttgaggaggcagagcactattgcacaaggctcttggattacaccggtccggaaagggagactgcaaaaagtattttgcaagggctaaaaagagcacaatcggtacttccgttgatggatatcgaccattttgcaatgtaaatttgacttgcagataagttatttagttggaaactaaggtgttaagtgagatgtacaagagaaaactaccccttgcgtattcttttctccatttttgcatgcatcgaggaaagctacacattggtttcaagagaactgctataatacagaacagtcatcatgaacaaaggggattggttatcactcacaccgcaccaggcaaggaaaagaaatctatctaaggccacacactgacccacctgatgaaactggtactttgcgtatctccagtaccagtagagcagccacttccgagcttcataatgtaatccttattgtttgtatccttgccagaaaactccatattgctggagatgttgaccttgtgtgcatgatgatctcttccagttgctgaagcttggtaattagtaacactaatcgccggcatggggcaaaaatgagcgtcatcgggatgatgaagatcgctagctcaagtatcggcattgctgcttgctttctgctaggttctgtttctatggcttttcttcactagattgctttggtctgtgttgcactcaaagttccatggagttgcttgcatatataagcttcttggaagacttgccttgtctggattccagttctcatattcttgcttgttaaaataattgttgatgctttcctttcc

SEQ ID NO: 4328 - DNA, 3868 bp, Oryza sativa
ggcttcctccaaggaaacctaccgcgtcgagctccgagccgccgcccgccagctcggcgagcgcggcctctactccgccgccaaatggtacgtacgcccccccgcccctaaaacccaccagggcccccctcctctaaaccctaaccctaaccctaaccgccgccgcctcttccttcctttgtagggcggccgagctgctcgtcggaatcgagcccgacgcgacgccggccccgtcgttggtgatggacaccccttcctcgtcgggctccgccgcatccgggggccgcctcctgcacctccaccgcagcggcgggtccagcttccgccgccgcctccgcccgggcgcggccgaggccgggacgccgctcggcggcgtctcgtacgtcagcacgcccatccccgatgacgacgcgttcgacgtggggggtgataggtacctgctcgccaagacctacttcgactgccgcgagtaccgccgcgccgcgcacgtcctgcgcggccagaccggccgcaaggccgtgttccttcggtgctatgccctgtacacggtgagttcggatcctattgttttttttaattattattttggtgtgcgcgggcgtgttccagtttgcagatgtttggtatagcgagtggtgtttgtctgcttgaggaaatgtctctctggagctgctgcaaatatttacggctgcaattctcttatagagttattcatatttttcaacctgtagaaacatctggttagttatcttgacgtgtcaatggagtaacagtagtgggatcttactgaaggaaacaacaggaatacattaaaattgttgtaaaaacgtaaaaatatttttatttggtatgttctcctttgttcatggtttgggcgctaaatctttgaagccctaggagcgccgatactaggatttacttgtcttaattgcccccccatgtcatggtataatgatgtactgatttatgtcagtttaaaccttagtaatttggtaaatgtctgaacatattgaaaaatgctgaaccctttattttacataactgttgcttatttgctttgttcctggttgtttggtgtccttaattatgcattacagggatgcttgattatttttattgtaagcaggggatgctggtttgctgcaatgttaacattagacgaatttattgcatgcaggaatgcattttactaatacagtggttctgttgtaatgaagtttggaaacattatattctaatattgagatgtatgggcagtataagatgttaacttatagtagtaacatgattgcctgatgcaacaaggagggctgaggatccaggtccataaatgatttatcttttcctctttgctatttaatttgtgatctgctaaaataggagtataggacacgccatagtaatacagtatataactgtacgcttgaggctatgttgcttttgattgctagtgtgccactagtgaatagtgactaatattaaagtattcaatttagaaccgtgctgatttccattttagcaggtctttctattacctggatttttatttaagttggcaagctgcactgtcaatatatacagttattgtcaatctttgcatcaatgtatgtctatatacactaacttattagatcgtacaaatgtggctagcagtcttcttatccatggaaggattctattaaatgatttatcttttcctctacaggttatctaatcttctaaatactagaaactgtctcccatttgcttcgtagtttaattagcattttgaaatttgacatgcttggtgatcatagttattttctctacaatttaggctggagagaaacggaaagaggaagaaacagtcgagcttgagggatctctgggcaaaagcaatgctgttaatcaggaactagttgcattggagagagagctcgcaacacatcggagaactggtgctattgattcattttgtttgtacttgtatggcattgttctacgtgataaaggcagtgaagctctagctagaacagttctggtggaatctgtcaacagctacccttggaactggagtgcttggttagagttacaatctctctgcactagcagtgacattttgaacaacttaaatatcaagaatcactggatgaaagatttcttccttgctagtgcacatctcgaattaaaaatgcatgaagaagctttgaaaagatatgagcgcttaatgggggttttccgttgcagtgactacattcaggctcaaatagctaccgtgcagtatagtatgagagacctggatgaagctgacatgatttttgaagaactccttaggactgatcctttccgtgtggattctatggacgtttactcaaatttattgtatgcaaaagaaagctcgactgctttgagtttccttgctcacagagtatttttgacagataaatatcgcccagaatcttgctgcataattgcaaattactacagtttgaaggggcagcatgaaaaatcagttctgtactttcaaagagcgctgaagcttaatcgaaagtatctttcagcttggactcttatgggacatgagtttgttgagctaaaaaatacacctgctgcgattgatgcctacaggagagctgttgatataaatcccagagattaccgtgcttggtatggtcttggtcagatctatgagatgatgggaatgccgttttatgcagtttattacttccgtaagtcatcatacctacaacctaatgatgcccggctttggaatgctatggctcagtgctatgaaagtgatcaactccagatgattgaagaagccatcaagtgctatgagagatctgcaaataataatgacaccgaaggaatagcacttcatcagctagcaaagttacatggtatgcttggacaatcagaggaggcagcattttactacaagaagaatctagagagaatggaagttgaggaaaggcaggcccagaattttgttgaagctctgcttttccttgctaagcattgcaagagcataggcaggtttgaggaggcagagcactattgcacaaggcttttggattacaccggtccagtaagttcaattttacacaaaattccttttacttactgatgaaaataacaaaagatggaatggagcaaatagacttcttcttatttattggctttgttaatgaacacttatgtttgcgtactaatgtagttcaaatagacttcaactcatccagtaagcattcactttgatttgttcttttagggtgcctgatttctttactctgggtctaagtgggaactggaaaatcatgtttttcattcataaataatcaatctttgtttgatctcttctttctgatgattctgattcactaccacctgtatgttctatatttacaggaaagggagactgcaaaaagtattttgcaagggctaaaaagagcacaatcggtacttccgttgatggatatcgaccattttgcaatgtaaatttgacttgcagataagttatttagttggaaactaaggtgttaagtgagatgtacaagagaaaactaccccttgcgtattcttttcttcatttttgcatgcatcgaggaaagctacacattggtttcaagagaactgctataatacagaacagtcatcatgaacaaaggggattggttatcactcacaccgcaccaggcaaggaaaagaaatctatctaaggccacacactgacccacctgatgaaactggtactttgcgtatctccagtaccagtagagcagccacttccgagcttcataatgtaatccttattgtttgtatccttgccagaaaactccatattgctggagatgttgaccttgtgtgcatgatgatctcttccagttgc

SEQ ID NO: 4329 - DNA, 2681 bp, Hordeum vulgare subsp. vulgare
gggagttctcccccaaatgccaaaatttcagacccgccgcattgcatcttctcccctctcccgtggcagtttcaaaatagtttgcgctctcactgcgccgatccgctccaaattagccaccccgcctccccctaccggcgtatggctgccgccaaggagaactaccgcgtcgagctccgagccgccgctcgccagctcggcgaccgttgcctctactccgccgcgaaatgggccgccgagctgctcgtcggcatcgagcccgacgcggcgccatcccagtcggcggcaatgggcaccccgtcctcctcgggcgccgcccctggcgagcggttgctgcatctgtaccgcagcggcgggtccagcttccggtgccgcacgcgacacggtggcggcggtggcgccgctgaggctgggacgccgctcggcggcgtctcgtacgtgagcacgcccatcccggacgacgatgcgttcgacgcaggggccgacaagtacctgctcgcaaagacctacttcgactgccgggagtaccggcgcgccgctcacgtgctgcgctcccaggtcgggcgcaaggccgtgttcctgcggtgctacgcgctttacatggctggagagaagcgaaaagaggaagagacaatagagctggaaggatctttggggaagagcaatgttgttaataaggaacttgttgcattggagagagagctctcaacacatcgcagaactggtgctattgattcctttggcttgtacttgtatggcattgttctacgcgataaaggctgtgaaggtatggctagaacagttctggtagaatctgtgaatagctacccttggaactggtgtgcttggttagagatacagtctttgtgcactagcagtgacattctgaacaacttaaatctgaagaatcactggatgaaagatttttttatcgctagtgcacatctggaattaaagatgcacgaagaagctttgaaaagatatgagcgcttgatgggggtcttccattgcagcgactacattcaggctcaaatagcaaccgttcagtatagtatgagggacctggatgaagctgacatgatttttgaagaactcctcagaactgacccttttcgtgtggattctatggatatttactcgaatttattgtatgcaaaagaaagcttgactgctttgagcttccttgctcacagggtgtttctgacagataaatatcgccctgaatcttgctgcataattgcaaattattacagtttgaagggacagcatgagaagtcagttttgtatttccaaagggcgctgaagcttaaccggaagtacctctcagcttggactctcatgggacatgagtttgttgagctaaaaaatacgcctgctgcaattgatgcctacagaagagctgttgatataaatcctagagattaccgtgcttggtacggtcttggtcagatctatgagatgatgggaatgccattttatgcactatactatttccgaaaatcatcccacctgcaacctaacgatgcacgcctttggattgctatggctcagtgctatgagagtgatccgcttcaaatgattgaagaagccatcaagtgctatgagagggctgcaaatactaatgacactgaaggaatagcacttcaccaattggcaaagttgcacagtatgcttgggcaagctgaggaggctgcattttactacaagaaggatttagagagaatggaagttgaggaaaggcagggccagaattttgttgaagcgttgcttttccttgcgaggcattgcaagaacatgggcaggtttgaggaagcagaacactattgcacaagactcttggattacactggtcccgaaaaggagactgcaaaaagtatattacaagggctaaaacgagcacagtctggatttccaccgatggatattgatcattttgcgttgtgaatttgacctgcagataagctatttgcttggggtagttgggcagagagtgtaaatgcacaagagaggagtgtcacttgcttctttatttatctccatcttacattcagcgagggacaatacatttggtttcaagagaaagctaaaaaacagagtatctatggacaaggggagttgttcatcccaccccagaggcaaggaaatgctagcaaggggctgcccacctgatgaaattggtgttcggacgtctccagctgcggatctagttccaagtttccttcacaatgtgacggttatcgtctgcagcctctccaggcgactccaaagggctggagatgatgatcttgtgcgcatgatgctcgccttcagctgctggaggttggcaagtagaagaactaggcgcctgcatggtgtgaagatgcacgccaccgggaggatccagatccccaattcaagaagtatcagcattgttggttgatctctgcttggcttctgaactatctatggctttttcttcactggactggtttgctttgctttgtgttgcctcgcccgcagttgcttgcatatataaagccaagcatctctggaaaacttgctttgtctggattccgggtgcatatattattgtttatctccattcatcagtagttgctgtcaaaaaaagaatagttgctgtccactattactatatttataatgaactcttcttcacaggacatgttatctcttcctgttgc

SEQ ID NO: 4330 - DNA, 1734 bp, Vitis vinifera
atgagttcaaaagatagttgcagaaacgagctccgatttgcaattcgtcaactaagcgatcgttgcctctactctgctgccaaatgggcggcagagcagttggtggggatcgagcaggatccggccaaattcacaccatcgcacaccagattccagcgaggtagctccagcattcgccggagatttcgcactaatgagattgcttccacaccaaccgccggcgtgtcttacgtatctacaccagtgctggaggaggacgaagccgtagatggtgatttctaccttttagctaagtcgtattttgattgccgggagtaccgtaggactgctcatgtgcttcgtgatcagactggaaagaaagctgtgttcttgcgatgttatgctctttatctggctggggaaaagcgcaaagaagaagaaatgatagaacttgagggaccattgggtaagagtgatgctgtgaaccatgaactggtttctctggaaagggagttgtcaacgctccgcaaaaatggcactgtcgatccctttggactgtatttatatggacttgtgctcaaagagaaaggcagcgaaaatcttgcccgtacagtactagtggagtcagtgaatagctacccctggaactggaatgcttggacagagctgcagtccttatgcactacaattgacattttgaatagtcttaatctcaataatcattggatgaaagacttcttccttgccagtgtttaccaagaactcaggatgcacaatgaatccttgggaaagtatgaatatttacaaggcacttttagtttcagtaactacattcaagctcagattgcaaaagcccagtacagtctgagggaatttgaacaagtagaaataatatttgatgagcttttaaggaatgacccttatcgagttgaagacatggatatgtattccaatgtgctctatgcaaaggaatgtttctctgctttaagttaccttgctcacagggtattcttgactgataaatacagacccgagtcttgttgcattattggaaactattatagtttgaaggggcagcatgagaagtcagttgtgtattttagaagggcactcaaattgaacaaaaattacttatctgcttggacactcatgggtcatgagtatgttgagatgaagaacactccagctgctgttgatgcctatcgaagggctgtagatataaatccgtgtgattatcgagcctggtatgggttaggacaagcatatgagatgatgtttatgccctattatgctcttcattacttccgaaaatcagttttcctgcagccaaatgattctcggttgtggattgccatggctcagtgctatgaaactgaccagcttcaaatgcttgaggatgccatcaagtgttacaaaagggcagcaaattgtaatgacacagaggcaatagcactgcaccagctagcaaagcttagtaaggagcttaagcgttctgaagaagctgcattttactacaaaaaggatttagagaggatggaagctgaagagagggaagggccaaatatggttgaagctctgctttttcttgctacatattacaaatcccagaagagatttgaagaagcagagatctattgcacccgtcttcttgattacactggcccagagaaagaaactgcaaagagtttactccggggaatgagaaaagcacaatctggtttcccttctatggatattgaacatttgcccccctaa

SEQ ID NO: 4331 - DNA, 4952 bp, Vitis vinifera
gagttcaaaagatagttgcagaaacgagctccgatttgcaattcgtcaactaagcgatcgttgcctctactctgctgccaaatggtatcccgatactttcaaaccctaactcctttactgaatccatatctctgtggtcttgcccataaatggaagaaaaaaaaaggaaaagagaaacgattttgtttaattagaagtgtaatattgaggtttgtttgtgtttacccaaaaggagcggagctgattttagttttgtttgatcactgttttcagggcagcagagcagttggtggggatcgagcaggatccggccaaattcacaccatcgcacaccagattccagcgaggtagctccagcattcgccggagatttcgcactaatgagattgcttccacaccaaccgccggcgtgtcttacgtatctacaccagtgctggaggaggacgaagccgtagatggtgatttctaccttttagctaagtcgtattttgattgccgggagtaccgtaggactgctcatgtgcttcgtgatcagactggaaagaaagctgtgttcttgcgatgttatgctctttatctggttcgtctcacgcttgtttgatcatcttttttggttcgaattggtcattcatctatcatttcatggttttgacctttcattatgttgtgcctgtggacgctatctacggtggcaggggttgggatggggaaagggaaagttccaggttcaattccatgtcacagaaaaaagaaaaagggtaaaaatattacatacgaaaacctggattttttttttttaattattaggaattattgctccagtatggtgtttgttgattatgaaarttaaattggtgcgctgacagtttgagtttggttaagccggcagtagtttgaggttggtttgcgcwttggagtgtcaaatgaaccctatcagtcaactggtctacggtttgcaaacccaagaaaaaaggggtctcggccttagaaatctgtctgttttaaactctgcttttctggacaagtgggtttggagatttgcgtctgaaagagaacctccatggaagcaagttattattgkcaagtttggaaagaaaggggatgttggtgctccagtgtgcaaaggaaggctttggtgtaggatcaaggaaggcaataaggtacaaatgggaggtttttaaaagtagagttcacttaattgtatgagacggaaggaggttaaagttttggtttgatagacagtgtgataactcccctttgagagcttcattccccttcttatatgycattgctagttcaaaagacttatgggtagcagatgcatgagagcaggttggggagaggggtctttggagcccttaatttttaggggaattccataattaggaattagagatggtggaaacctttctgagaactcttcaaaagcatatagtgagacaggcaatagaggatagaatgtttggttggagtctaaaagtggtgaggtcttaggaaaagcattctgcaccttcctggcttcaaagggttcagagcccagctaatattatttggtatctatggattttgtcgatagtggggaattttttttgcatgcaaagcatcatggggtaggattttggttttggactatttgaaaaagagaggtgtgtttgtagcgaacaaatgttatatgtgtaagcagaaaggacaattcgttgactatattcttctacattgcgtcctagctagcatattgtgctagttgttcttttccatgtttgggatagcttgggtgatctactcttcaacaagacacatgatgcagctggaagggattctatgttgggaagagacagaggagagtgtggacgattgcctctttatgttttttttatttttttttgggactatttggagagagtaaaatcaaaaaacttttgataatttggaatatgcaaagcaagggctcaactatttatttatgtgcaagtttttggattgcataaggcattgtatagaggaggcatctatgtttatggtggattttgttgattggttgggcttaggttgggtcagagatagaattgtgtcttttattttttattctttttgttgaggactctttgtatactccctgtatactttggtgtgtcttgtctatatcactttctaaatattttcattctcatacatatatatatatatatattgattaccaaggaaccttccatggttggtctcttcaaactctccataaggacccaaaccttaatgtattgactgcgcacaccgcaattagcatcrggtaatataggatgaccaaccaattgcacgaatcgaactcrggactgtgcgcctctaccatgcatcctaacatttgccctaaccaatggggcacgctgataggctatatatatatattgtgtgttcataaaaaattatggaatacrttagggttttgtataagattrccaatccatacctcctgtggtggtggcatgtgaagcagattctgaagagatgtttaatcagtactacttgtgaggattgatattgttgctataagaggcatgaagtaatgcaattggtgtgatttgaaatttagtttttggaaaagaaaaaaatgtcttgatgagatttgtgatatcataccatgtatgtccaaccatgagttgattgtagcattgtacttgaccaaattgaaagctataccatatgtagatagtttctgtttctttttagtgtctttagaataagcattttcagtaatttccgatacaaaattgtttttgtatcttcacacaaccaaacattgtgatgtaatttggttaggtctggttcatgggtaattcatgcccttgcgctgactgctgacctgagaaacttaggtgtgaaactaactgagagttctttgttgatcatatatcatcaggttcatgggatcattatatctggtagacttgtttgacatgtaatgagttgatttcactttagtataagcatatttcattttagttctaatgcatgaactggatgtagcttagattttgggatktaccatgtctatccaccattgtctccyttctctggctttgaatattgttttcttaatttactcctttttaacctttaattagatttccagagtccagacaaattgattaatgaatttgggctgatttatttacttcagacaccattctgttacatgaatgactttcattaaaggggtggccttctaaatatgttggggactgcaattactagttggacctgcttatgattgacctgcttatcattggtgttatagttctgttcacatgcttacactgccaatacattatgtcactcctyacagaaatactttaacattatccaatgcattttaatctgstgcacttwtctgatattgattcagttgaggtgatgtatagacatagctctatcacttcctaaaagttctatttacttatttttctacttttaagtkcttcatgtaggctggggaaaagcgcaaagaagaagaaatgatagaacttgagggaccattgggtaagagtgatgctgtgaaccatgaactggtttctctggaaagggagttgtcaacgctccgcaaaaatggcactgtcgatccctttggactgtatttatatggacttgtgctcaaagagaaaggcagcgaaaatcttgcccgtacagtactagtggagtcagtgaatagctacccctggaactggaatgcttggacagagctgcagtccttatgcactacaattgacattttgaatagtcttaatctcaataatcattggatgaaagacttcttccttgccagtgyttaccaagaactcaggatgcacaatgartccttgggaaagtatgaatatttacaaggcacttttagtttcagtaactacattcaagcwcagattgcaaaagcccagtacagtctgagggaatttgaacaagtagaaataatatttgatgagcttttaaggaatgacccttatcgagttgaagacatggatatgtattccaatgtgctctatgcaaaggaatgtttctctgctttaagttaccttgctcacagggtattcttgactgataaatacagacccgagtcttgttgcattattggaaactattatagtttgaaggggcagcatgagaagtcagttgtgtattttagaagggcactcaaattgaacaaaaattacttatctgcttggacactcatgggtcatgagtatgttgagatgaagaacactccagctgctgttgatgcctatcgaagggctgtagatataaatccgtgtgattatcgagcctggtatgggttaggacaagcatatgagatgatgttyatgccctattatgctcttcattacttccgaaaatcagttttcctgcagccaaatgattctcggttgtggattgccatggctcagtgctatgaaactgaccagcttcaaatgcttgaggatgccatcaagtgttacaaaagggcagcaaattgtaatgacacagaggcaatagcactgcaccagctagcaaagcttagtaaggagcttaagcgttctgaagaagctgcattttactacaaaaaggatttagagaggatggaagctgaagagagggaagggccaaatatggttgaagctctgctttttcttgctacatattacaaatcccagaagagatttgaagaagcagagatctattgcacccgtcttcttgattacactggcccagtgagtttctcttataaaccttttttctcatgtgttgtttacataaagattaattacccattttacaattcatgaataacgattgacaacaaaaactttacctcagctctattgaccttttgtgttttgcaggagaaagaaactgcaaagagtttactccggggaatgagaaaagcacaatctggtttcccttctatggatattgaacatttgcccccc

SEQ ID NO: 4332 - DNA, 1504 bp, Sorghum bicolor
gctagaagcagacaagcagctgcgggagcaaaagggggccatggcttctgacagtagcttctactttgttcccttgctcctcctgttgatgctcttgctggtctctcctaccgccactgcagcacagccctcttccgagcctggcggcaatgccactgctgcaaggctgaggccggggaaggagctgctcaggcacaagaggatcagggctctgctgaccaagcttaacaagcctgctctcaagacaatccagagtccggatggtgatatcatagactgtgttccctctcacctacagcctgcatttgaccacccaaagctcaggggccaaaagattctggatccaccggagaggcccaagaactgcaacttcacccttggcggcagcagagtcagcgaggtggtagtgcaggcgtggcatgccactggcgaggcgtgtccggaggggacggtgccgatacggcggacgacggagaaggatctcctcagggccagctctctcaggaggtacggcaggaagcctgtgcgccgaggcgttcgccgggattccacaagcagcggtcatgagcatgcagttgggtatgtaaactctgaacattactatggggccaaggctagtgttaatgtgtggtcaccaagggtaggtgacccatccgagtttagcctgtcacagatctgggtcatctctggctctttcggcaatgatctcaacaccatcgaagctggatggcaggtaagccctgagctatacggagacagtaacccaagattcttcacctactggacaactgacgcgtaccaagaaactgggtgctacaaccacaattgccgcggattcgtgcagacgacgaacaagatcgcggttggggcggctatcaccccggaatcggtgtacaatggcaggcaatttgacattactctcatgatatggaaggatccaaagcacgggcactggtggctggagctgggcccgggcctcgtagtcgggtactggccgtcgtacctcttcagtcacctggctcgccacgccaacatggtgcagttcggcggtgaggtcgtcaacacccggccgtcggggtcgcacacggcgacacagatgggcagcggccacttccccagagagggcttcgaccgcgccgcctacttccggaacctgcaggtggtggactgggacaacaacctcatcccggcagccaacctgaaactcctcgccgatcaccccggatgctacgatatccagggaggctctaacagctactggggaagctacttctactacggagggccagggaggaacgtgaaatgtccctgagattatccatctttgttttccctttgcttgtttgaagctgttttctcttgtcatttttctgatagcatgtacctttctaggattttgtaggtcttatacgtctttaacggtagaatgcatcaacagttgagacttgagaggaatttgtaaatttgagaagtacctgccagatcatgcattcaattcgcagaa

SEQ ID NO: 4333 - DNA, 1679 bp, Zea mays
cggcgagcctgcatcaggcattcagaagcagtgaagtgagagaggtaaaacaagctgagactctaacttcaaaggaagatacacacacaaaggacagtgagaaggaggccaaggcttgctcgcaaggcgctagggaggaagaagacaaccacgcactattgctgttgcttgtgcttagtgtgtgctcgcggctagaagcagacaagcagctgcgggagcataagggcggcatggcttcttgcggtagcttctactttgttcccttgctcctgctgatgctcctgctcgcttctcccgccactgctgcactggtgacatcctcccagcctggcggcaatgccactgctgcaaggccgaggccggggatggagcagctcaagcgcaagaggatcagggctctgctcaccaagcttaacaagcctgctctcaagactatccagagctcggatggcgacatcatagactgtgttccctctcacctccagcccgcatttgaccacccaaagctcaggggcgaaaagattctggatccgccggagaggcccaagaaccgcaacttcacctttggcggcagcggcagaagcagggtcggcgaggtggtggtgcaggcgtggcacgccaccggcgaggcgtgtccagaggggaccgtgccgatacggcggacgacggagaaggatctgctcagggctagctccctcaggaggtacggcaggaagccagcgcgccggggtgttcgccgtgattccacaagcagcggccatgagcatgcagttgggtatgtaaactcagaacagtactatggggccaaggccagtgttaatgtgtggtcgccaaggataggtgacccatctgagttcagcctgtctcagatctgggtcctctctggctccttcggcaatgatctcaacaccatcgaagctggatggcaggtaagcccagagctatacggagacagtaacccaagattcttcacctactggacaactgacgcgtaccaagaaaccgggtgctacaaccacaattgccgcggattcgtgcagacgacgaacaagattgcaattggggcggctatcaccccggagtcggtgtacaatggcaggcagttcgacatcactctcatgctatggaaggacccaaagcacgggcactggtggctggagctgggcccgggcctcgtagtcgggtactggccgtcgcacctcttcagccacctggctcgccacgccaacatggtgcagttcggcggcgaggtcgtcaacacccggccgtcggggtcgcataccgcgacgcagatgggcagcggccacttccccagagagggcttcgaccgcgccgcctacttccggaacctgcaggtggtggactgggacaacaacctcatcccggcggccaacctgaaactcctcgccgaccatcctggatgctacgatatccagggaggcactaacagctactggggaagctacttctactacggaggacccgggaggaacgccaaatgtccctgagatcaattcggaccggatgtctctttcttgttcgatgttcttttttcgttgccctttctaggatttggtaggtcttatacgtctttaacgaaagaatgcatccacggttgagacttgggaggaatttgtaaatttggcaagtacctgttatatttaatatccctatggctc

SEQ ID NO: 4334 - DNA, 1396 bp, Zea mays
tgctgatgctcctgctcgcttctcccgccactgctgcactggtgacatcctcccagcctggcggcaatgccactgctgcaaggccgaggccggggatggagcagctcaagcgcaagaggatcagggctctgctcaccaagcttaacaagcctgctctcaagactatccagagctcggatggcgacatcatagactgtgttccctctcacctccagcccgcatttgaccacccaaagctcaggggcgaaaagattctggatccgccggagaggcccaagaaccgcaacttcacctttggcggcagcggcagaagcagggtcggcgaggtggtggtgcaggcgtggcacgccaccggcgaggcgtgtccagaggggaccgtgccgatacggcggacgacggagaaggatctgctcagggctagctccctcaggaggtacggcaggaagccagcgcgccggggtgttcgccgtgattccacaagcagcggccatgagcatgcagttgggtatgtaaactcagaacagtactatggggccaaggccagtgttaatgtgtggtcgccaaggataggtgacccatctgagttcagcctgtctcagatctgggtcctctctggctccttcggcaatgatctcaacaccatcgaagctggatggcaggtaagcccagagctatacggagacagtaacccaagattcttcacctactggacaactgacgcgtaccaagaaaccgggtgctacaaccacaattgccgcggattcgtgcagacgacgaacaagattgcaattggggcggctatcaccccggagtcggtgtacaatggcaggcagttcgacatcactctcatgctatggaaggacccaaagcacgggcactggtggctggagctgggcccgggcctcgtagtcgggtactggccgtcgcacctcttcagccacctggctcgccacgccaacatggtgcagttcggcggcgaggtcgtcaacacccggccgtcggggtcgcataccgcgacgcagatgggcagcggccacttccccagagagggcttcgaccgcgccgcctacttccggaacctgcaggtggtggactgggacaacaacctcatcccggcggccaacctgaaactcctcgccgaccatcctggatgctacgatatccagggaggcactaacagctactggggaagctacttctactacggaggacccgggaggaacgccaaatgtccctgagatcaattcggaccggatgtctctttcttgttcgatgttcttttttcgttgccctttctaggatttggtaggtcttatacgtctttaacgaaagaatgcatccacggttgagacttgggaggaatttgtaaatttggcaagtacctgttatatttaat

SEQ ID NO: 4335 - DNA, 1848 bp, Oryza sativa Japonica Group
gatagtactagtacaactacaaaccttgcttgcaagttgctgaatagtagtggagcagtggagcagcagcagtggcatataaacacacacacacagcagcaacagcagcctcctcctagctagatgctggtgaggcaaagttcagtgatcacttgcttcaaagggtgcagcagtgtaggagaggtgaggaggcacaggaagaagacaaccacatactattgccactctctcctgtgactgtgtgtgtgtgcgcgtgtgcgtgcttgctagatccagacaagctgtggaagcaaaaggaggatggcttgtagcttccactttgttcccttgctcctcctcctcaccttgctcttgctcatctcctctgccagtagaactgctgcattgccctccatgcgcagtagcagtgaagacaccgccagtaatgctactgctgctgcaaggcttaggccagggaaggagctgcttaagtacaagaggatcagggctctcctcaagaaactcaacaagccttctctcaagaccattcagagcccagatggtgatctcatagactgtgttccctctcatctccaacctgcatttgaccatccaaagctcaagggacaaaagcttctggacccaccggagaggcccaagaactacaacctcaccattgccgtcagcagcagcagcagcagtagagtaggtgaggtggtggtgcaggcctggcatgccgccggcgaggagtgcccggaagggacggtggcgatacgccggacgacggagaaggacctgctcagggccagctccctccggaggtacggcaggaagccggcacgccggaatattcgccgtgattccaccagcaacggccatgagcatgcagttggatatgtgaacaatgataattactatggggccaaagctagtgttaatgtgtggtcaccaaggataggtgacccatctgagttcagcctgtcacagatctgggttatctctggctccttcggcaatgatctgaacaccattgaagctggatggcaggtcagccctgagctgtatggagacagtaacccaaggttcttcacatattggacaaccgacgcatatcaagagaccggttgctacaaccacaactgccgtggatttgtccaaacgaccaacaagatcgcgatcggcgcggctatcacgccagaatcggtgtacaacggaaggcagtttgacattaccctgatgctatggaaggaccccaagcatgggcactggtggttagagctgggcccgggtatggtggtggggtattggccatcgtatctgttcacccacctggcgcaccacggcaacatggtgcagtttggcggcgaggtggtgaacacgcggccgtcggggtcgcacacggcgacgcagatggggagcggtcacttccccggcgaggggttcgaccgcgccgcctacttccgcaacctgcaggtggtggactgggacaacagcctcatcccggcggccaacctcaagctcctcgccgaccaccctgcctgctacgacatccagggaggctccaactcctactggggcagctacttctactacggcggccccggcaggaatgtcaaatgcccttgaaaggatctcgctctctccatctcttgttgcttgatggccggtcactcttgtttttctttttttgttcgtttgtttgtttgttttctttcttctgtgttcttctttgtgatagagattggttagtgcattaatgctaggatattactctatttgttaggtcttagcttgagctgctgaatgcatatgggagcaattaaattgagagggatttgtaaatttgagaagcaccttgattttgggatc

SEQ ID NO: 4336 - DNA, 2451 bp, Zea mays
aaccaactctgatccttccttccttgtctctctcgatcgaacccaggccaccggatacccgagagcgctagtgttgttgccatggccgccgcgactgttgttggcggaacgtggacgagaacatcaaggtcgtcgttgtcgctagtggtggtattcctgctgctacacatgggcgtcggagccactgcgacgccgccgcggcaccacaccgccgccgccagtggcatcacattgcgcgtcgatgactatctgcatcaggtggctgtggacaacggcctggtgcaggtgacgctgtccaagccacagggccacattaccggcgtccgctacaacggccaccgcaacctcctgcactacgacggcagccaaaactcgggagggtattgggatgtggtgtggaactacccgggctccgatcagccaggaggaatgatggacacgttggacagtacggagttcaaggtggtggtttcaagcgaggaccaagtcgagctttctttcagcagcgcctacactccgtcgtcgccaactagtgttcacctgcatgtcgacaagaggctcgtggtactgaaaggcagctccgggttctactgctacgccatcttggagcacgcccgcgactggcccgccctcaacgtcaccgaggccaggctcgccttcaagctcaacacggacgcgttcaagtacatggcggtctcggacgacatccagaggtacatgccgagcgcggcggacagggccgagccacgtggcgccccgctcgcctacaaggaggccgtgctgctggtgaacccgcaggagccacggttcaggggcgaggtggacgacaagtaccagtactccatggacaacaaggacagcaccgtgcatggatggaccacggccggcggcgtagaacgctcgccgaacgacaaccccgtcgtcggcttctgggtcatcacgcccagcaacgagttcaagagcggaggacccaccaagcgggagctcacctcccacgtcggccccaccacgctcacgatgtttstggggacgcattacgtcggtaacgacatcgtgctcagcatcagcggcggcgagtactggaagaaggtgatgggccctgtcttcgtgtacctcaactcccgcccgaggcgaggcggcatcggcggctgcgaccacagccgggcgctctgggcagacgccaaggcgcaggcgcgggcggaggccggcaagtggccctacagcttcccaaagtcaccggacttcgccaaggccggagagaggggcggcgtcaccggcaggctgctggtcagggacgacgacaggttcacgaccgacgacgacaataacgacgcggccgccgctcccatgcccgttgggacggaggcgtacgtgggtctcgcggcgcccgggcaggccggcagctgggtaacggagtgcaagggctaccagttctggacagcgacaacggcgacggaggacggcttcgtattcaccatcgccaacgtccgggagggagtgtacagcctctacgcgtgggttcccggggtcctcggaraatacgtgcacgcttccccggtgaccgtggcggtaggcggcgccgtcgtcgacctcggcgacctcgtgttccggccccccaggtcgggcccgacgttgtgggagattggggtccccgaccggaaggccgcggagttcttcgttccavacgtggatccccgattcgccaacaggctcttcctgcacaaggacaggtacaggcagtacggtctgtgggcgaggtacgccgagctgtaccctgacggcgaccccgtcttcaccgtcggccggagcgaaccttggaaggactggttcttcgcgcatgtcaccaggaaggtaggcgaaggccggtacgcgccgacgacgcgggagatccgattcaggctgtaccgcgtcgtggccgacggcacgtacacgctgcgtgtgtcgctcgctgccgcgcacatgtccaggctgcaggtgcgcgtgaatgggcggggcggtggcggtkcggcggagctgaccacaccggagttcggcggcgggaacgccatcgcgcgccacgggatccatggagtgcagtggaacttccagttcccaatcaggggatacctgctgcgggaaggcgacaacagcgtcagcatcacgcagaccagggccgacggcgagttcctaggtgtcttgtacgactacgtccgcctcgaggcacctccggcgcactgccgagaccccacggccacggcgacgacgtggcgtacatgatcggtgcttggtcgccaccgtctacccttgcctagaccaggtagtaccgtagtagcagtagctaggtgatgatagcatcgtctctagctaacagagatatatactttcatagttagtggaccgtgcgtttgcgatgtgttgccagggtacgtatgagatttttgggtacctctattatcaaaaaaaaaaaaaaaa

SEQ ID NO: 4337 - DNA, 2202 bp, Sorghum bicolor
atggccgcggctgctgggacggggacggggatgatgacaaggtcgtcgtcggtgttgctgctgatagtggtgacgactgtgaccctacacatcagcgtcgtcggagcgtcgtggtggtcgccattttccctgccgcaccgcggcggcggcgccgcctccagatcatcgccggccacggcggcccctggcgttacgttgcgcgtcgacgattatcaccatcaggtggttgtggacaacggcgtggtgcaggtgacgctgtcgaaaccgcagggccacatcaccggcgtccgctacaacggcgagcgcaacctcctgcacttcgacggcagcgaaaactcaggagggtactgggatgtggtgtggaactaccggggctccgatcagccaagaggaatgatcgacatgttggacagtacggagttcaaggtcgtggtttcaactgaggaccaagtggagctctctttcagcagcacatacaatccgtcacgccaagacagtgttcgcctgaatgttgacaagaggcttgtgatgctgaaaggcagctccggtttctactgttacgccatcatggagcacaccagcgactaccctgctctcaacatctccgaggctcgactggctttcaagctcaacactgacaagttcaactacatggcgatttcagacgacatacagaggtacatgccgagcgcggcggacagggacgagccacgtggcacgccgctggcctacaaggaggccgtgctgctggtgaacccgcaggagccgcagttcaagggcgaggtggatgacaagtacgagtactccatggacaacaaggacaacgccgtccatggctggatcaccggcggcggcggccccatcgtcggcttctgggtcatcactcccagcaacgagttcaagagcggcggacccatgaagcgggagctcacctcccatgtcggccccacctcgctcactatgtttcttggcacgcattacgtcgggaacgacatcgtgctcagcgtcggcgacggcgagtactggaagaaggtgatggggccggtcttcatctacctcaactccggccccagccgcggcggccacgtcagggcgctctgggacgacgccaaggcgatggcgcgtgcggaggccggcaagtggccgtacagcttcccggagtcgccggacttcgccaaggccgacgagaggggctccgtcgcaggcaggctggtggtccaggacacgttcacgagcaccgccgccgacgttcccgccttgacgacggcgtacgtcgggctcgccgcgcccgggcaggctggcagctgggcgacggagtgcaagggctaccagttctggacgacggcggacgcgtcctgcggcggcggcggcgggttcagcttcaccatcggcaacgtccggccgggggtgtacagcgtctacgcgtgggttcccggggtgctcggagactacgtgtcggcttcctcggtgaccgtgactgcaggcggcgccgtggtcgacctcggcgagctcgtgttccggccacccaggtcgggcccgacggtgtgggagatcggcgtccccgaccggaccgccgcggagttcttcgtccccgacgtggatcccagatacgccaacaggctcttcatcaacaaggacaggtacaggcagtacgggctgtgggcgaggtacgccgagctgtaccctgacggcgaccccgtgttcaccgtcggccagagcgacgcttccaaggactggttcttcgcgcacgtcaccaggaaggtcggcgacggcgacggcgacggcgacgggcggtacgcggcgacgacgcgggagatccggttcacgctggaccgcgtggtggccgacggcacctacacgctgcgcgtggcgctcgcggccgcgcagatgtcgaggctgcaggtgcgcgtgaacgggaggggaggaggtgggttggcggcggagctgacgacgccggagttcggcggcgggaacgccatcgcgcggcacggcatccacggcgtggagtggagcttcgagttcccgatcagagggtacatgctgcaggagggcgagaacagcgtcagcatcacgcagaccagggccgccggcgagttcctcggagtcttgtacgactacctccgcctcgaggcacctcccgggtcatggcgagaccccacgacggcggcgagggcgaggacgaggacgacgcggcgtgcgtga

SEQ ID NO: 4338 - DNA, 1566 bp, Sorghum bicolor
atgggcagccttgacaccacccctaccgccaccgccaccttcgccgacatcaacggcagcggcggtttccagccactcaacgccgacgacgtgcgctcctacctccacaagtccgtcgacttcatctacgactactacaagtccgtcgagtcactccccgtgctcccaggcgtggagccaggctacctacggcgactgctgcagtcagtaccacccacctcctccgcgcccttcgacattgccctaaaagaggtccgcgacgccgtcgtcccggggatgacccactgggccagcccaaacttcttcgccttcttcccggccaccaacagcgccgccgcgatcgcgggcgagctcgtcgcctccgccatgaacaccgtcggcttcacctggcaggccaaccccgccgccaccgagatggaggtcctcgcgctcgactggctcgcccagctcctccgcctcccgtccaccttcatgaaccgcaccgctgccgcgggacgtgggtctggtggtggcgtcatcctcggcaccaccagcgaggccatgctcgtcacgctcgtcgccgcgcgtgacgccgccctgcgccggagtggatccgttggcgtcgctggcatcactagcctcgccgtctacgccgctgaccagacccactccaccttcttcaaggcgtgccgcctcgccggctttgatccggccaacatccgctccattgccaccggaccggagaccgactacgcccttgatccggcgaagctgctcgagatcatgctggccgacgtcgacgccgggctcgtgccgacatacatctgcgccacggtcggcaccacgtcgtcgaacgccgtggaccctgtcggagccatcgccgatgtcgccgccatgttcgacgcgtgggtgcacatcgacgcggcctacgccggcagcgcgtgcatctgcccggagttccggcaccacctcgccggcgtcgagcgggtggattccatcagcatgagcccgcacaagtggctcatgacatgcctggactgcacgtgcctgtgggtgcgcgacgcgcaccggctcaccgactcgctggagaccaacccggagtacctcaagaacgacgccagcgagtccggcaatgtcaccgacctcaaggacatgcaggtcggcgtcggccgccgcttccgggggctcaagctctggatggtcatgcgcacctatggcgccgccaagctccaggagcacatccggagcgacgtcgccatggccaagatgttcgaggaagccgtgcgcgccgacgaccggttcgaggtcgtggtgccgaggaacttcgcgctcgtgtgtttcaggatcaggccggaaggcgccatgacggaggaggacgccgaggaggtcaaccgtgagctcatggagcggctgaacaggaccgggaaggcgtacctggcgcacacggtggtcggcggcaagtttgtgctgaggttcgcggtggggtcgtcgctgcaggaggagaggcacgtgcgaagtgcgtgggagctcatcaagaagacgaccaccgagatcatggaggaagctagagatgtagtagagaattaa

SEQ ID NO: 4339 - DNA, 1889 bp, Zea mays
cttccagagcttccgttccaagcgagctagtcctcctcgccatcattgcaactagctagctctgcttcttcgtccttagctctcgcacataatctttgaagaacgaacaccaacccaccaacgatcacacactactcaatccatcgactgacatgggcagcctcgacaccacccctaccgccgccttcgccgacgtcgccggcggtggcttcgagccgctcaacgccgacgacgtgcgctcctacctgcacaagtccgtcgacttcatctacgactactacaagtccgtggagtctctgcccgtgctgccgggcgtggagccgggctacctgcgccgcctgctgcagtccgtgccgcccacctcctccgcgcccttcgacattgccctaaaggaggtccgcgacgccgtcgtgcccgggatgacccactgggccagccccaacttcttcgccttcttcccgtccaccaacagcgccgccgccatcgcgggcgagctcatcgcctccgccatgaacaccgtcggcttcacctggcaggccagccccgcctccaccgagatggaggtgctcgcgctcgactggctcgcgcagctcctgcgcctgccgcccaccttcatgaaccgcaccgccgctgcagggcgcgggaccggcggtggcggcgtcatcctcggcaccaccagcgaggccatgctcgtcacgcttgtctccgcgcgcgacgccgccctgcggagggcaggctccgtcggggtcgctgggatcaccaggctcgccgtctacgccgccgaccagacgcactccaccttcttcaaggcgtgccgcctcgccggcttcgacccggccaacatccgctccatccccaccggcccggagacggactacgccctcgacccggcgaggctgctcgaggtcatgcaggccgacgtggacgccggcctcgtgcccacctacgtgtgcgccacggtcggcaccacgtcgtccaacgcggtcgacccggtcggagccattgccgatgtcgccgccgtgttcaacgcctgggtccacatcgacgccgcctacgccggcagcgcgtgcatctgcccggagttccggcaccacctggacggcgtggagcgcgtggactccatcagcatgagcccgcacaagtggctcatgacgtgcctggattgcacgtgcttgtgggtgcgggacacgcaccggctcaccgattctctcgaaaccaacccggagtacctcaagaacgacgccagcgagtccggcaccgtcaccgacctcaaggacatgcaggtcggcgtcggccgccgcttccgcgggctcaagctctggatggtcatgcgcacctacggctccgccaagctccaggagcacatccggagcgacgtcgccatggccaagatgttcgaggacgccgtgcgtgccgaccaccgcttcgaggtcgtggtgccgaggaacttcgcgctcgtgtgcttcaggatcaggccacagggcaccgacttgacggaggaggacgccgacgtggtcaaccgtgagctaatggagcgcctgaacaggacgggcaaggcgtacctggcgcacacggcgatcggcggcaagttcgtgctgcggttcgcggtggggtcgtcgctgcaggaagagaggcacgtgcgaagcgcgtgggagctcatcaagaagacgaccaccgagatcttcgaggaagagacgatgtagagagtattactatagattatcgtcattcttatttattgattgatgcagctggactaataaatatggttatgcatgccaatcgaaaggtgacgtccaataaagcctttcgtgatgcatatatattcatgcaagaaatttatgtacgttggacctggagtatataacaatgtattatttatgggctaa

SEQ ID NO: 4340 - DNA, 1560 bp, Sorghum bicolor
atgggcagcttggacaccaaccctaccgccttctctgccttcggtgacgacgtctcctccggcttccagccgctgaaccccgacgacgtccgctcctacctccacaaggccgtcgacttcatctccgactactacaagtccgtcgagtcactccccgtgctgcccgacgtcaagccggggtacctacgcgaccagctgcggtccgcgccgcccacgtcctccgccccgttcgacgtcaccatgaaggagctcaccgcctccgtcgtccccggcatgacccactgggccagccccaacttcttcgccttcttccccgccaccaacagcgctgcggccatcgccggcgacctcatcgcgtccgccatgaacaccgtggggttcacatggcaggccgcgccggcagccaccgagatggaggtcctcgcgctcgactggctcgcgcagctcctacgcctgccgtccagcttcatgaaccgcaccggcgctgcagggcgcggcaccggtggtggcgtcatcctcggcaccaccagcgaggccatgctcgtcacgctcgtcgccgcgcgtgatgccgcactgcgccggagtggctcccacggcgtgtccgggctgccgcgcttggccgtgtacgccgccgaccagacccactccaccttcttcaaggcctgccgcctcgccggcttcgaccctgccaacatccgctccatccccaccggcccggagacggactacgccctcgacccggcgaggctgctcgaggtcatgcgtgccgacgtcgaggctggcctcgtgccgacctacgtctgcgccaccgtcggcaccacgtcgtccaacgccgtcgactctgtcggagccattgccgatgtcgccgcggtgttcaaagcctgggtccacatcgacgcagcgtacgccggcagcgcgtgcatctgcccggagttccggcaccacctcgacggcgtggagcgcgtcgactccatcagcatgagcccacacaagtggctgctcacatgcctcgactgcacgtgcctgtgggtgcgcgacacgcaccggctcaccgactcgctggagacgaacccggagtacctcaagaacgacgccagcgagtccggcaacgtcaccgacctcaaggacatgcaggtcggcgtcggccgccggttccgggggctcaagctctggatggtcatgcgcacctatggcgccgccaagctccaggagcacatccggagcgacgtcgccatggccaagatgttcgaggacgccgtgcgcggtgacgaccggttcgaggtcgtcgtgccgaggaacttcgcgcttgtgtgcttcaggatcaagccccatggcggcggcatgacggaggaggacgccgacgaggccaaccatgagctcatggagcgcctcaacaggaccgggaaggcgtacctggcgcacacggtggttggcgacaggtttgtgctgcggttcgccgtgggttcgtcgctgcaggaggagaggcacgtccggagcgcgtgggagctcatcaacaagaccaccagtgagatcatgcaggaacacatcgctgtggagtag

SEQ ID NO: 4341 - DNA, 2142 bp, Zea mays
cgtcgccggagatcgcatgccagcgcgcgacacgacggcgcatggcaattgaccgcctgacttgactagctcgccgcgcccctttgccagattgccagttgccacagccaattctcttctcctaccaacgtcgtcttcgtcacccacgagcagcagcagtcgcacgtacgaccacgccgacgccctcgtccccacgccactcccttgctgccttgcctcctcctccacctgcatgcctatatatcccaaccctaacttctgccttcttccccaccaaaccccacggagctcgatctgcagccttcgatctgtcagtgtccactgaccagtcagctgcagctcgcaggctcgtagccgctagctcgacctctaggctctagctccaacttccccgctgtgttaatctagcgatcggcaagtcatgggcagcttggacaccaatcctaacgccttctccgccttcggcgtcgacgccaccaccggcttccagcccctccaccccgacgacgtccgcgcctacctccacaaggccgtcgacttcatctccgactactacaagtccgtcgagtcactgcccgtgctgccggacgtcaagccagggtacctgcggcagcagctaaggtccgcgccgcccacgtcctccgccccgttcgacgtcaccatgaaggagctgacggactccgtcgtccccggcatgacccactgggccagcccaaacttcttcgccttcttcccgtccaccaacagcgccgcggccatcgccggcgacctcatcgcgtccgccatgaacaccgtcggcttcacgtggcaggccgcgccagccgccacggagatggaggtcctcgcgctcgactggctcgcgcagctcctgcgcctgccgcccagcttcatgaaccgcaccggcgcagctgggcgcggcaccggcggcggcgtcatcctcggcaccactagcgaggccatgctcgtcacgctcgtcgccgcgcgtgacgccgccctccgccggactggctcccagggcgtgtccggccttccgcggctggctgtctacgccgccgaccagacgcactccaccttcttcaaggcgtgccgcctcgccggcttcgacccggccaacattcgctccatccccaccggccccgagacggactacgccctcgacccggccaggctcttcgaggtcatgcaggccgacgtcgacgccggcctcgtgccgacctacgtctgcgccacggtcggcaccacgtcgtccaacgccgtcgacccggtcggagccattgccgacgtcgccgccgtgttcaacgcctgggtccacatcgacgccgcctacgccggtagcgcgtgcatctgcccggagttccggcaccacctggacggcgtggaacgcgtcgattccatcagcatgagcccgcacaagtggctcttgacgtgcctggactgcacgtgcttgtgggtgcgcgacacgcaccggctcactgactctctcgagaccaatccggagtacctaaagaacgacgccagcgactccggcaacgttaccgacctcaaggacatgcaggttggcgtcggccgccggttccgggggctcaagctctggatggtcatgcgcacctacggcgcggccaagctccaggagcacatccggagcgacgtcgccatggccaagatgttcgaggacgccgtgcgctccgacaaccggttcgaggtcgtggttccgaggaactttgctctcgtgtgcttcaggatcaagccccatggtggcggtataatgacggaggaggacgcggacgaggccaaccgtgagctcatggagcgcctcaacaggaccgggaaggcttacctcgcgcacacggtggtcggcgacagatttgtgctccggttcgccgtcggttcgtcgctgcaggaggagaggcacgtccggagcgcgtgggagctcatcaacaagaccaccactgagatcatgcagaaataataaattaaattaaattaaatttattatatgcaagtatatacaaaaatagtagtatcataaatttaatacatgcaagtatatacgtatagtagtccatgagggaattttacttttattgatatgtttgattctttgttgtttgcccaaaggaggaataataaagccgatcaaag

SEQ ID NO: 4342 - DNA, 1593 bp, Hordeum vulgare
tcctaatccagtgctaaattattacctacttacaaggaatgggcagcttgggcaccaaccccacgtccttctccgccttccccgacgacaaggcggcgttcgagccgctcaaccccgaagatgtccgtgcataccttcacaaggccgttgatttcatctccgactactacaccaacgtcgagtccatgcccgttcttcctaacgtgaagccgggatacctgcaagatgagctcaccgcgtccccgccgacacactccgcgccgttcgacgtcaccatgaaggagctcaggacatccgtcgtccccggcatgacgcactgggctagccccaacttcttcgccttcttcccctccaccaacagcgccgctgccatcgccggcgacctcatcgcctcggccatgaacaccgtcgggttcacgtggcaagcctcgcctgcagccaccgagatggaggtcctcgctcttgactggcttgcgcagctcctgcacctgcccaccaccttcatgaatcgcaccagcactggtcgtggcaccggcggtggtgtcatcctcggcacaacgagcgaggcaatgcttgtcacgctagttgccgcccgtgatgcagcactgcgtcgaagcggctctgtcggcgtgtctgacatcccacgcttggctgtgtatgctgccgaccagactcactccacgttcttcaaggcttgccgccttgcaggcttcgaccccgccaacatccgctccatccctacggggccggaaacaaactatgggctcgacccagccaagcttctcgaggtcatgcaagctgatgccgacgccggtcttgtgccaacatatgtttgcgccaccgtgggcaccacgtcttccaatgccgtcgacccggtgggcgccgttgccgatgttgccgccatgttcaatgcgtgggtccatgtcgatgctgcttacgctggcagcgcgtgtatctgcccggagtttcgccaccatctcgacggtgtcgagcgcgtggactccattagcatgagcccacacaaatggcttctcacgtgcctcgactgtacatgtctctatgtccgtgacgctcaccgactgagcgactcattggagaccaacccggagtacctcaagaacgacgtcacggattccggtgaggtcaccgatcttaaggacatgcaggtcggtgtcggccgacgcttccgtggtcttaagctttggatggtcatgcgcacctacggtaccgcaaagctccaagagcacatccgtagtgacgtcgccatggccaagatgtttgaagattccgtccgtgccgacaacaggtttgaagtggtcgtgccgaggaactttgctcttgtgtgctttaggatcaaggcaaggggagacatgacggaggaggatgccgacgaggtcaaccgccttctaatggagaatctaaacaagactggcaaggcttatcttgcgcacaccgtggtcggtgacagatttgtgcttcgttttgctgttgggtcatcgctgcaggaggagaggcatgtgagaagtgcatgggacctcatcaagaagactaccagcagtatcatggattaagtgcactgaccaactgttcagg

SEQ ID NO: 4343 - DNA, 1572 bp, Oryza sativa Japonica Group
atggggagcttggacgccaacccggccgccgcctacgccgcgttcgccgccgacgtcgagcccttccgcccgctcgacgccgacgacgtccgctcctacctccacaaggccgtcgacttcgtctacgactactacaagtcggtggagtcgctcccggtgctccctggcgtcgagccgggctacctcctgcggctgctgcagtcggcgccgccgtcgtcgtcggcgccgttcgatattgctatgaaggagctcagggaggcggttgtccccgggatgacccactgggcgagcccgaatttcttcgcgttctttccggcgacgaatagcgccgccgcgatcgccggtgagctcatcgcgtcggcgatgaacaccgtcggattcacgtggcaggcggcgccggcggcgaccgagctggaggtgctcgcgctggattggctcgcgcagctgctcgggttgccggcgagtttcatgaaccgcaccgtcgccggtgggcgcggcaccggcgggggcgtcattctggggaccaccagcgaggcgatgctcgtcacgctcgtcgccgcgcgcgacgccgcgctgcggcggagcgggtccaatggcgtggcgggcatcacgcggctgacggtgtacgccgccgaccagacgcactccacgttcttcaaggcgtgccgcctcgccgggttcgatccggcgaacatccggtcgatccccaccggggccgagaccgactacggcctcgacccggcgaggctgctggaggcgatgcaggccgacgccgacgccgggctggtgcccacctacgtgtgcgccacggtgggaaccacgtcgtccaacgccgtcgacccggtgggcgccgtggccgacgtcgcggcgaggttcgcggcgtgggtgcacgtcgacgcggcgtacgccggcagcgcgtgcatctgcccggagttccggcaccacctcgacggcgtggagcgtgtcgactccatcagcatgagcccccacaagtggctgatgacctgcctcgactgcacctgcctctacgtccgcgacacccaccgcctcaccggctccctcgagaccaacccggagtacctcaagaaccacgccagcgactccggcgaggtcaccgacctcaaggacatgcaggtcggcgtcggccgccgcttccgggggctcaagctctggatggtcatgcgcacctacggcgccggcaagctgcaggagcacatccggagcgacgtcgccatggccaagacgttcgaggacctcgtccgcggcgacgaccggttcgaggtcgtggtgccgaggaacttcgcgctcgtctgcttcaggatcaggccgaggaaatccggcgccgccatcgccgccggcgaggcggaggccgagaaggcgaaccgcgagctgatggagcggctgaacaagaccggaaaggcttacgtggcgcacacggtggtcggcggcaggttcgtgctgcgcttcgcggtggggtcgtcgctgcaggaggagcggcacgtgcgaagcgcgtgggagctcatcaagaagacgaccaccgagatcgtcgccgacgccggagaagacaagtag

SEQ ID NO: 4344 - DNA, 1574 bp, Hordeum vulgare subsp. spontaneum
tattacctacttacaaggaatgggcagcttgggcaccaaccccacgtccttctccgccttccccgacgacaaggcggcgttcgagccgctcaaccccgaagatgtccgtgcataccttcacaaggccgttgatttcatctccgactactacaccaacgtcgagtccatgcccgttcttcctaacgtgaagccgggatacctgcaagatgagctcaccgcgtccccgccgacctactccgcgccgttcgacgtcaccatgaaggagcccaggacctccgtcgtccccggcatgacgcactgggctagccccaacttcttcgccttcttcccctccaccaacagcgccgctgccatcgccggcgacctcatcgcctcggccatgaacaccgtcggattcacgtggcaagcctcgcctgcagccaccgagatggaggtcctcgctcttgactggcttgcgcagctcctgcacctgcccaccaccttcatgaaccgcaccagcactggtcgtggcaccggcggtggtgtcatcctcggcacaacgagcgaggcaatgcttgtcacgctagttgccgcccgtgatgcggcactacgtcgaagcggctctgtcggcgtgtctcacatcccacgcttggctgtgtatgctgccgaccagactcactccacgttcttcaaggcttgccgccttgcaggcttcgaccccgccaacatccgctccatccctaccgggccggaaacaaactatgggctcgacccagccaagcttcttgaggtcatgcaagctgatgctgacgccggtctcgtgccaacatatgtttgcgccaccgtgggcaccacattttccaatgccgtcgacccggtgggcgccgttgccgatgttgccgccatgttcaacgcgtgggtccatgttgatgctgcatacgctggcagcgcgtgtatctgtccggagtttcgccatcatctcgacggtgtcgagcgcgtggactccattagcatgagcccacacaaatggcttctcacgtgcctcgactgcacatgtctctatgtccgtgacgctcaccgactgagcgactcattggagaccaacccggagtacctcaagaacgacgctaccgattccggcgaggtcaccgatcttaaggacatgcaggtcggtgtcggccgacgcttccgtggtcttaagctttggatggtcatgcgcacctacggtaccgcaaagctccaagagcacatccgtagtgatgtcgccatggccaagatgtttgaagattctgtccgtgccgacgataggttcgaagtggtcgtaccgaggaactttgctcttgtgtgctttaggatcaaggcaaggggagacatgacggaggaggatgccgacgaggtcaaccgcttgttaatggagaatctaagcaagactggcaaggcttatcttgcgcacacggtggtcggtgacagatttgtgcttcgtttcgccgttggatcatcgctgcaggaggagaggcatgtgagaagtgcatgggacctcatcaagaagactaccagcagtatcatggattaagtgcactgaccaactgttcagg

SEQ ID NO: 4345 - DNA, 1866 bp, Oryza sativa Japonica Group
aaaccaacacaccaacctagctaactcactcactcactccttcttcttgcgacctagctatcgagctagagcttccaaaaccctagctagctagctgagacagttagtttcatctcgaactagttgttgatatgggcagcttggacaccaaccccacggccttctccgccttccccgccggcgagggtgaaaccttccagccgctcaacgccgatgatgtccggtcctacctccacaaggcggtggacttcatctcggactactacaagtccgtggagtccatgccggtgctgcccaatgtcaagccggggtacctgcaggacgagctcagggcctcgccgccgacgtactcggcgccgttcgacgtcaccatgaaggagctccggagctccgtcgtccccgggatgacgcactgggcgagccccaacttcttcgcgtttttcccctccacgaatagtgcggccgccattgccggcgacctcatcgcgtcggcgatgaacacggtcgggttcacgtggcaggcgtcgccggcggccaccgagatggaggtgctcgcgctggactggctcgcgcagatgctcaacctgccgacgagcttcatgaaccgcaccggcgaggggcgtggcaccggcggtggggttattctggggacgaccagcgaggcgatgctcgtcacgctcgttgccgcgcgcgacgccgcgctgcggcggagcggcagcgacggcgtggcgggactccaccggctcgccgtgtacgccgccgaccagacgcactccacgttcttcaaggcgtgccgcctcgccgggtttgatccggcgaacatccggtcgatccccaccggggccgagaccgactacggcctcgacccggcgaggctgctggaggcgatgcaggccgacgccgacgccgggctggtgcccacctacgtgtgcgccacggtgggcaccacgtcgtccaacgccgtcgacccggtgggcgccgtggccgacgtcgcggcgaggttcgccgcgtgggtgcacgtcgacgcggcgtacgccggcagcgcgtgcatctgcccggagttcaggcaccacctcgacggcgtggagcgcgtggactccatcagcatgagcccccacaaatggctgatgacctgcctcgactgcacctgcctctacgtgcgcgacacccaccgcctcaccggctccctcgagaccaacccggagtacctcaagaaccacgccagcgactccggcgaggtcaccgacctcaaggacatgcaggtcggcgtcggccgccgcttccgggggctcaagctctggatggtcatgcgcacctacggcgtcgccaagctgcaggagcacatccggagcgacgtcgccatggccaaggtgttcgaggacctcgtccgcggcgacgacaggttcgaggtcgtcgtgccgaggaacttcgctctcgtctgcttcaggatcagggccggcgccggcgccgccgccgcgacggaggaggacgccgacgaggcgaaccgcgagctgatggagcggctgaacaagaccggcaaggcgtacgtggcgcacacggtggtcggcggcaggttcgtgctgcgcttcgcggtgggctcgtcgctgcaggaagagcatcacgtgcggagcgcgtgggagctcatcaagaagacgaccaccgagatgatgaactaagtaaagagaagattacaaataaatacacatatttagaacacatatacgtttttgatttttttttttggggttttagatgcgaatctgttgattcattttgtgagctatttatacctatggatatatggatcaaaataaattattatttggttgtaatttttttaaaagatgaactgatactataccttac

SEQ ID NO: 4346 - DNA, 2313 bp, Hordeum vulgare subsp. vulgare
ggcagagcctccccccgtgactctccttctctcctctcctctcctctgtctctccatccggcctcctcctcccatggcttccggcgtccacgcggcggcggagggcgtcgccgcgctcgggatctccgccgccgagtgggccgagccctgccccgcgctgcgccggaacctgcgtctcctctcccacgaccaggttgaacttgcgaggatgctgctgaatgaaggccagggacacttgtttgaacactggccagagcccggtgtcgatgatgacaagaagaaaagcttctttgatcaggtttgccgacttaattcaagctatcctggtgggctggcagcatacatccagaatgccaaaaagcttttagcagattccaaggcaggacaaaatccatatgatggcttcacgccttctgttccctcaggggaagcattgacctttggtgatgacaactttgtttcactggaagcagctggggtaaaagaagcacgcaatgctgcatttgttcttgtagctggtggtcttggtgaaagacttggttacaaaggaattaaggtagcactccccagggagacaaccactgggaaatgttttcttcaacattacatagagtctattctgtctttacaagaggcgagctgcaaaatggagggtgaatgccatacgaagatcccatttgctattatgacttctgatgatacaaatgcactgaccatcaagcttttggaatcaaactcctattttggaatggaaccatcacaagtgaaaattctaaagcaggaaaaagtagcatgtctagctgacaacgatgcaaggcttgcattagatccaaatgacaagtacaagatccagacaaagccacatgggcatggagatgttcattctcttctttattcaagtggattacttgagcaatggaagagtacaggacggagatgggttctctttttccaggacacaaatggattgctctttaatgcaataccatcggcattaggtgtcagtgccaccaagggctacaatgttaattctcttgcagttcctcgaaaggcaaaggaagccattggtggaataaccaagcttactcatgttgatggtagaacaatggttatcaatgtcgagtacaatcagcttgatccactccttcgtgcaactgggcatcctgatggagatgcaaattgtgaaacaggctattctccataccctggaaatataaaccagctgatactggagcttggaccatacattgaggagctcaagaaaacacatggtgccatttctgaatttgtaaatccaaagtatactgattctaccaagacagcatttaaatcctccactcgtcttgagtgcatgatgcaagactatccgaaaacactacctccaaccgcaaaagttgggtttacggtgatggatacctggcttgcatatgctcctgtaaagaacaatcctgaagatgcagctaaagttccaaaaggcaatccttttcatagtgcaacctctggcgagatggcgatttacagggcaaacagcctcattttaagaaaggccggggcacagatatctgaccctgtagtcagcactttcaacggtcaagaggtagaggtctggccacgtgtgacctggagcccgaggtggggtcttatgttcaaggacgtcaagcgaaaggtgcacggcaactcttcgatttctcagagatcatttctggtcatcaatggccagaacatcgtcatcgacggcctttccttggacggcgctcttatcgccaactcggttgatgaagcagaggtcaaagttaccgggcacgtggagaacaaagggtggaccatccggcacgtcgaccacagggacacatcggagaaggaagagacgaggatccgcgggttcaagtttgagaaggtggagcagctggaggtgaactacacggagccgggaaagcattgcctgagcccatgaagaggcatgggatggctggtggttgacatggtccctctgccaattcgcagctggggatagtaaagtacattacattgtcctcccagaattgggtggccttattattgtcatgtgatagcaatagcaataagctggagccatttctttgccttccaatgtactatactataataaggagcaaagctgcttcagcaaccaggcagtcaccgacccaccgttgctcatgtaaatttgtagtaaccgatggagtatttatttatagtcgccgttcgtttctttttgtaaagtaaacaatgttgatatcgcatagggagatgtgaggctgatattttcctcactgaagcacataagattgtttc

SEQ ID NO: 4347 - DNA, 2170 bp, Zea mays
ctggcagtcaccgacgcgacgcgggtcgtctcctcagccctcctgttcagcctcctcgccagcgatggcttcgggcgccgacgccgcggcgctggtgacctccggcgccgacgagtgggcagcggcgtgtccgccgctgcggcggaacctgcagctgctcgcgcctgacgaggttgagctagcaaaaatgctgttgaatgagggccagattcacctatttgaacactggcctgaaccaggcattgatgacgacaagaaaagaggcttctttgatcaggttcgccggcttaattcaagctatcctggaggtctggtatcttacatcaagaatgccaaaaaacttcttgcagattcaaaggcaggaaaaaacccatatgatggtttcaccccttctgtgccttcaggggaaattttgaacttcggcgatgacaattttgtttcactggaagcagctgggataaaagaagcccacaatgctgcatttgttcttgtagctggagggcttggtgaaaggcttggttacaaaggaattaaggtagcacttccccgggaaacaacaactggaaaatgtttcattcaacattatatagagtctatcctggttttacaagaggccagctgcaaaacggttgatgatgggtgccaaaaaaagattccatttgtcattatgacttctgatgatacaaatgcactaactatcaagcttttggagtcaaactcttactttggaatggaaccatctcaagtgaaattgctaaagcaggaaaaagtagcttgtctagctgacaatgatgcaaggcttgcattagacccaagtgacaagtacaaaattcagacaaagccacatgggcatggagatgttcattctcttctttattcaagtggcttgcttgagcaatggaagagtgaagggcggaagtgggttctctttttccaggatacaaatggattgcttttcaatgcaattccgtctgctttaggtgtcagtgccaccaagggttacaatgtaaattctctcgcagttcctaggaaggctaaggaagcaattggaggaattaccaaacttactcatgttgatggtagaacaatggtcatcaatgtagagtacaatcagcttgatccactccttcgtgcaactggttatcctgatggagatacaaattctgagacaggctattctccataccctggaaatataaaccagttgatactggagcttggaccatacattgaggagctaaagaaaacgcatggtgccatttctgaatttgtaaatcccaagtatactgattcgaccaagacatcatttaaatcatccactcgtctagagtgcatgatgcaagactatccaaagacgttgccaccctcaacaaaagttggattcacggtgatggatacatggcttgcttatgctcctgtgaagaataatcctgaagacgcggctaaagttccaaaaggcaatccttatcatagtgcaacctcaggagagatggcaatttacagggcaaacagccttattttgagaaaggctggtgcgcagatagctgaccctgtcgttgataccttcaacgggcaagaggtagaggtctggccacgcgtaacctggagtccacggtggggtctcaccttccagagcgtcaaggagaaagtgcatggcagctgttcagtttctcagaggtcagctttggtcatcgatggccggagtgtcttcctcgacggactttcattggacggcacccttattgtcaatgctgtggatggtgcagaggttaaagttactggtcatgtagaaaataagggctggactatccggcatgtggactacaaggacacctcggagaaggaagaggtcaggatccgtgggttcaagttcaacaagtctgagcagctagaggtgaactacaccgagccaggaaagcatagcttgagtgcgtgaaaagaaaacattcttgacctgactagcttcgtaccaaaatggaaatagctcacatctgggtcgcctcccagattctgggagggaggccaatgccagcgtagctgaaaccgttcttctccttcccccacgtacaacaaggagcaaagtgcttcaccaagcactcaacattctttatgtatatcttgtacagaactcctcttcagtgcaatcagagttcattgtttgtttgggatc

SEQ ID NO: 4348 - DNA, 2271 bp, Oryza sativa Japonica Group
accgattcctccgcaaaaaaaaatataaaaaccgcgactttgtgagcgatttgggagacggttttgttgctcccccacttctgactccacacgccacgccacgcccgcgcgatggcttccgacggcgacggcgccgcggcggtggcggcgctggggatctccggcggcgggggcgacgactgggcgccgccgctgcggcggaatctcccgctgctcgcgccccacgaggttaagcttgcaaaattgctgctgagtgaaggacagtcacatttgtttgaacactggccggaaccaggtgttgatgatgacaagaaaaggaacttctttgaccaggtctgccgccttaattcaagctatcctggtgggctggcatcgtacatccagaatgcaagaaagcttttagcagattcaaaggcaggaaaaaatccatatgatggcttctcaccttctgttccttcaggggaagtattgacctttggtgatgacaactttgtttcgcttgaagaagctggggtaaaagaagcccgccatgcagcatttgttcttgtagctggtgggcttggtgaaagacttggttacaaaggaattaaggttgcacttcccagggaaacaactactggaaaatgctttcttcaacattacatagaatctattctagctttgcaggaggcgagctgcaaattggtagagggtgaatgcaatacaaagatcccatttgttattatgacttctgatgacacaaatgcactaaccgtcaaacttttggagtcaaactcctattttggaatggaaccatcacaagtgcacattcttaagcaggaaaaagtggcatgtttagctgataatgatgcaaggcttgcattagacccaaatgacaagtacaaaatccagacaaagccacatgggcatggagatgtccacgctcttctttattcaagcggcttgcttgagcaatggaagagcacagggcggaaatgggttctctttttccaggacacaaatggattgctcttcaatgcaataccatcagcattaggtgtcagcgccaccaaaggttataatgttaattctcttgcagttccacggaaggcaaaagaagccattggaggaataacaaaacttactcatgtcgatggtagaacaatggtcatcaatgtcgagtacaatcagcttgatccactccttcgtgcaaccggacatcctgatggagatgcaaattgtgaaacagggtactctccataccctggaaatataaaccagttgatactggagattggaccatatatggaggagctccagaaaacacacggtgccatttcggaatttgtaaaccctaagtatactgattctaccaagacagcatttaaatcgtccactcgtcttgagtgcatgatgcaggactatccaaaaacactacctccctctgcaaaagttggatttacggtgatggatgcgtggcttacttatgctcctgtaaagaataatcctgaagattctgctaaagttccaaaaggtaatccttaccatagtgctacttcaggagagatggcaatttacagggcaaacagccttattttaagaaaggctggtgcacagatagctgaccctgtaattgatactttcaatggccaagaggtagaggtttggccacgcataacctggatcccaaggtggggtcttatattcaaggatgtcaaagccaaagtccatagcaactcttcagtttctcagaggtcagccttggtcatcaatggcaagaacatcaccattcaaggcctctccttggatggcactcttatcgtaaatgccaaagatgaagccaagttcaatgttacaggtcatatagagaataaaggctggactatccagcacgtcgatcacaaggacacctcggagaaggaagagatcagaatccgcgggttcaagttcaacaaggttgaacagctagagttgaactactagccagggaagcattgcatgaacaaatcatccctggtttacatcatctgcaaccaaaatgttcagttgaaaataatccacattaggtggccatatatgtgataagctgatactattcgttggtctcccaagtgataaataaggagctaactgcttcaccaattaagcaattatcaatcctaagtgtaaatttttacagtagccgttatttacagccaagtcattttaatgtaaaataactgaagttacgtaggatgcttgtactgaacacttagtattgaagcaaccaagatgccttgaaatgtccttgtc

SEQ ID NO: 4349 - DNA, 2241 bp, Zea mays
atttaaagaaaggaaaccgttttcgatttccttcctacgcgtctcgcgttggcagcgcgatccttcggagccgacgaatcccaccaggccaccactgcccgcgccgccttcgcagacgacgcaactgacagtcaccgacgcgacgcggctcgcctcctccgcccttctgttcagcctcctcgcccgcgatggctccgggcgccgacgccggctacggccagtgggcggcggcgtgccccccgctgcggcggaacctgcagctgctttcgcccgacgaggttgagctagcaaaaatgctgttgaatgaaggccagattcacctgttcgaacactggcctgaaccaggtgtcgatgatgacaataaaagaggcttctttgatcaggttcgccgacttaattcaagctatcctggaggtctggtatcttacatccagaatgccaaaaaacttcttgcggattcaaaggtgccttcaggggaggtttttacttttggcaatgacaattttgtttcactggaagcagctgggataaaagaagcctgcaatgctgcatttgttcttgtagccggagggcttggcgaaaggcttggctacaaaggaattaaggtagcacttccccgggaaacaactactggaaaatgtttccttcaacactatatagagtctatcctggcttttcaggaggccagctgcaaaatggttgatgaggggtgccaaacaaagattccatttgttattatgacttctgatgatacaaatgcgctaactatcaagcttttagagtcaaactcctactttggaatggaaccatctcaagtgaaaatactaaagcaggaaaaagtagcgtgtctagctgacaatgatgcaaggcttgcattagacccaagtgacaagtacaaaattcagacaaagccacatgggcatggagatgttcattctcttctttattcaagtggcttgcttgaacaatggaagactgaaggacggaagtgggttctctttttccaggatacaaatggattgcttttcaatgcaataccatcagcattaggtgtcagtgccaccaagggttacaatgtaaattctctcgctgttcctaggaaagccaaggaagcaattggaggaattaccaaacttactcatgccgatggtagaacaatggtcatcaacgtagagtacaatcagcttgatccactccttcgtgcaactggacatcctgatggagattcaaattgcgagacaggctattctccatatcctggaaatataaaccagttgatactggagcttggaccatatattgaggagctcaagaaaactcatggcgccatttctgaatttgtaaatcccaagtatactgattcgaccaagacagcatttaaatcatccactcgtctagaatgcatgatgcaagactatccaaagacgttgcctccctcagcaaaagttggattcacggtgatggatacatggcttgcttacgctcctgtgaagaataatcccgaagacgcagctaaagttccaaagggcaacccttatcatagtgcaacatccggagagatggcaatttacagggcgaacagccttattttgagaaaggctggtgctcagatagctgatcctgttgttcacaccttcaacggacaagaggtagaggtttggccacgcgtaacctggagcccacggtggggtctcaccttcaagagtgtcaaggagaaagtgcacgggaactcttcagtttctcagaggtcagctttggtcatcaatggtcagaacgtcttccttgaaggcctctcgttggacggcactcttgttgtcaacgccatcgatgaagcagaggttaaacttaccggtcatatacagaataaaggctggactatccagcatgtcgactacaaggacacctcggagaaggaagagatcaggatccgcggatttaagttggagaagattgagcagctagaggtgaactacacggagccaggaaaccatagcttgagtgcatgaaacaaaacattcttggttgacccgactagcttcctaccgattgggaatagttcgcattgcctcccagattctgggaggccattccagcataagttgaagctgttcttctccttgccaaagaattgtactccctcagttgcattttagttcaaaattaaactagtggacaacaaatatttaagaatggtggtagtaataaggagccaaatatttaagcaaaaaaaaaaaaaaaaaa

SEQ ID NO: 4350 - DNA, 2206 bp, Arabidopsis lyrata subsp. lyrata
ttcccagttttatctcaaactctctctctgtcgtcttgatcgatctcccaaatctcaaattcggaacaaaacacataatttggttcggtcttcttcttcaattttcaccgacacaaacccgtattttcctcttctctctctcatttctatcaattttctcgacaattccccagtcgtcgaagaagctacagcttgcaatttgctcgtgttctcttccatcgttccaaaaagccttttcatggcttccacggttgattccaatatcttctcatccgtcccagctcttcagagtaacctcggaattttgtctcctgatcagatcgaattggccaagatcttattggaaaatggtcagagtcatctcttccaacaatggcctcaacttggcgttgatgacaaacagaaactagattttttcgatcagattgctcgcttaaattcaagttatcctgggggtttagcggcatacattaagactgcgaaagagcttctcgctgattcgaaattagggaagaacccatatgatggtttctctccttctgttccttcaggagaaaatcttacttttggtaatgagaacttcatcgaaatggaaaatagaggtgtcgtcgaagctaggaatgccgcttttgttcttgttgctggtggtcttggcgagcgtcttggttacaatggaatcaaggtggcacttccaagggagacaactactgggatatgcttcttgcagcactacattgaatctatattggctcttcaagaagctagcaacaagatcgcttctgatggaagtcagagagacattcctttcattattatgacatctgatgatacacattcacgtacactggagctattagagtcaaactcttattttgggatgaaacctactcaagtacatcttctaaaacaggaaaaagttgcatgtcttgatgataatgacgccaggcttgcattagaccctcacaacaaatacagtatccagacgaaacctcatggacatggcgatgttcattcacttctatattccagtggccttcttcataaatggcttgatgctggtttaaaatgggttttgtttttccaagatacaaatggtcttctcttcaatgcaattccagcttctttgggtgtgagtgcaaccaaacagtatcatgttaactctcttgctgttccccgtaaggcgaaggaagctattggaggaattactaaacttactcacgttgatggcagatctatggttatcaatgtggagtacaatcaacttgatcctctacttagagcatctggattccctgatggagatgttaattgtgagacaggcttttcgccattcccgggaaatattaatcaattgattctggatcttggtccctacaaagacgagttgcaaaaaactggaggggccatcaaagagtttgttaatccaaaatacaaggatagcaccaaaacagcgtttaaatcttcaactcgtctagagtgtatgatgcaagattatccaaagacattgcctccaacagcacgagttggattcacggtgatggatatatggcttgcttatgcacccgtaaagaataatcctgaggatgctgctaaggtaccaaagggaaacccatatcacagtgcaacttctggagaaatggcgatttatcgtgctaacagcctcattcttcaaaaggctggtgtcaaagtggaagagcctgtgaagcaagtcttgaatggccaagaggttgaagtatggtctcgtatcacatggaaacccaaatggggaatgatcttctctgatatcaaaaagaaagtcagcgggaactgcgaggtctctcagagatccacgatggctatcaagggtcgtaatgtttttattgaagatctctccttggatggtgctcttattgtagattccattgatgatgcagaggttaaacttggaggtttgataaagaacaatggttggaccatggagagtgtagattacaaggacacatcggttccagaagaaataagaatcagaggtttcagattcaacaaagtggagcaactcgaaaagtatttcactcaacctggaaaattttctgtggaagattgaagttatctttgtgacactttgaaaaagtgttatttggcaatatgattaattagcaaattatctttttttttaaatgccaaatgatccatttgtccttctaattgagggcttaattctttcttt

SEQ ID NO: 4351 - DNA, 2375 bp, Arabidopsis thaliana
taacgcattttcgttgattcactttccagctttatctcaaactctctctctgtcgtctcgatcgatctcccaaatctcaaattctgaattgattttttttgtttataaacaaagcaaacaaaacacataattttggttcggtcttcttcaattttcaccgacacaaacccgtcttttcctcttctctctcatttctatcaatttttctctacaattccccagtcgtcgaagaagctacagcttgcaatttgctcgtgttctcttccatcattcctttgttaagagcctcttcatggcttctacggttgattccaatttcttctcatccgtcccagctcttcacagtaacctcggacttttgtctcctgatcagatcgaactggcgaagatcttattagaaaatggtcagagtcatctcttccaacaatggcctgaactcggtgttgatgataaagagaagctagcttttttcgatcagattgctcgcttaaattcaagctatcctggaggtttagcagcatacattaagactgcgaaagagcttctcgctgattcgaaagtagggaaaaacccatatgatggtttctctccttctgtcccttcaggagaaaatctcacttttggtactgacaacttcatcgaaatggaaaaaagaggtgtcgtcgaagctaggaatgctgcttttgttctggttgctggtggtcttggcgagcgtcttggttacaatggaatcaaggtggcacttccaagggagacaactacagggacatgcttcttgcagcattacattgaatctatattggctcttcaagaagctagcaacaagatcgattctgatggaagtgagagagacattcctttcattattatgacatctgatgatactcattcacgtacactggacctgttagagttaaactcttattttggaatgaaacctactcaagtacatcttctaaaacaggaaaaagttgcatgtcttgatgataacgatgccagacttgcattagaccctcacaacaaatacagtatccagacaaaacctcatggacatggtgatgtacattcgcttctttattccagtggccttcttcataaatggcttgaggctggtttaaaatgggttttgtttttccaagatacaaatggacttctcttcaatgcaattccagcttctttgggtgtgagtgctaccaaacagtatcatgttaactctctcgctgttcctcgcaaggcgaaggaagctattggaggaattagtaaacttactcacgttgatgggagatctatggtaatcaatgtggagtacaatcaacttgatcctctacttagagcatctggattccctgatggggatgttaattgtgagacgggcttctccccattcccgggaaatattaatcaattgattctggaacttggtccctacaaagacgagttgcaaaaaactggaggggccattaaagagtttgttaatccaaaatacaaggatagcaccaaaacagcatttaaatcttcgactcgtctagagtgtatgatgcaagattatccaaagacattgcctcctacggcacgagttggattcacggtgatggatatatggcttgcttatgcacccgtaaagaataaccctgaagatgctgctaaggtaccaaagggaaacccatatcatagtgctacttctggagaaatggcgatttatcgtgctaacagcctcattcttcaaaaggctggtgtcaaagtggaagagcctgtgaagcaagtcttgaatggccaagaggttgaagtatggtctcgtatcacatggaaacccaaatggggaatgatcttctctgatatcaaaaagaaagtcagcgggaactgcgaggtctctcagagatccacaatggcaatcaagggtcgtaatgtatttatcaaagatctctccttggacggtgctcttattgtagattccattgatgatgcagaggtaaaacttggaggtttgataaagaacaatggttggaccatggagagtgtagattacaaggacacatcggttccagaagaaataagaatcagaggttttagattcaacaaagtggagcaactcgaaaagaagttaactcaacctggcaaattttctgttgaagattgaagttatctttgcacatttatgtgacacttttttaaaaagtgttatttggcaatatgatcaattagcaaattagctatttttttaagagaatgccaaatgatccattaatttgtccttctaatggagagcttaattctttctttcgttttgtttccaacgaaacacttccttttctttgtttttcaacaaaacccgaatatattgtttctttatgtttttctaaatctttattagcctg

SEQ ID NO: 4352 - DNA, 1909 bp, Sorghum bicolor
tattcagctctgagctggagtcgcctgacatctcgttttcacttgtacggttgcacttctataagcgaattaagcaacgaagacttcaactctctgctacctcctgctgctccgatctctctccagtctccattgctagctagctgaaggctccgtggcggtcatatcgccgtcgagctgaggggcggcgccgaccggcgaccggccagccatggagatgcagccacagctcgccgactgttctccggataagcttgccagcgtcgctctgacacccagagggcgcctggactcgcaggaaggccggtggccggcgcaggagaaggacatcgacgattggctccccatcaacgcgaggaggaacgccaagtggtggtactccgccttccacaatgtcaccgccatggtcggcgccggcgtgcttggccttccctacgccatgtccgagcttggctgggaggttggcatcacggtgctgctcctgtcatggatcatcacgctgtacacgctgtggcagatggtggagatgcacgagatggtgcccggcaagaggttcgacaggtaccacgagctcgggcagcacgcgttcggcgagaagcttggcctgtggatcgtcgtgccgcagcagctggtggtggaggtcggcctcaacatcgtctacatggtcaccggcggccagtccctgcaaaagttccacgacgtggtctgcggcgacaagcagtgcaaggacatcaagctcacctacttcatcatgatcttcgcctcctgccacttcgtcctctcccagctccccaacttccactccatctccggcgtctccctcgccgccgccgtcatgtcgctttgctactcgacgatcgcatggatcgcgtcggtgcagaaggggaagtcgccggaggtgcactacggcctgcgcgcgacgacgacgccggggaaggtgttcggcttcttcggcgcgctcggggacgtggcgttcgcctacgccgggcacaacgtggtgctggagatccaggccaccatcccgtcgacgccggagaagccgtccaagaagcccatgtggaagggcgtcgtcgtcgcctacatcgtcgtcgccgtgtgctacttccctgcctcactcgtcggctactgggccttcggcaacagcgtcaacgagaacatccttgtcacactcaacaagcccaagtggctcattgccctcgccaacatgatggttgtcgttcatctcattggcagctaccaggtatatgcgatgccagtgtttgacatgatagagacggtgctggtcaggaagtttgggttccgtccaagcttgatgctccgtctcattgcccggagtgtctatgtcgggttcacaatgttcgtagccatcaccttcccgttcttcactgcattgctcagcttctttggcggatttgccttcgcaccgacaacgtattttcttccttgcatcatgtggctcacaatatacaaacccaaaactttcagtatctcgtggtttaccaactggatctgcattgtcctaggtgttttgctgatggtactgtcaccaatcggtggacttcgggagatcatcttgaaagccaagacataccacttctaccagtaaacatgattaattcaacacaaaaaccaaggttggtgttgtagttaacaaatgttcgacatgtcccaagttttgagtgggacacaacatttatcttcatcttggcaaaagaaattttcaatttgggttacgtcttaccaagtttttgtcatggaacaagatgggatgtgtcatgaaagctttgttgctgctcatgacaatctgtgacatgtcgtggttgttaacctaggagtttgttttgtgataccatatacatgtgtatatcttgtttgtatatattctaggaaagagttagcttatttgtgc

SEQ ID NO: 4353 - DNA, 1605 bp, Zea mays
ccagtagctagtgctaccttcccctgctccgacctctatctgtcgttctgtctatctcgtccgtcgccgtcgagccggctatggagatgcagccacagctcggcgactcttctccggaggacaagctcgccagccgccctctgacacccggagggcgctggtcggactcgcagtggcggcccgcggaggagaaggccatcgacgactggctccccatcaacgcgcggaggaacgccaagtggtggtactccgccttccacaatgtcaccgccatggtcggcgccggcgtgctcggcctcccctacgccatgtccgagctcggctggggccccggcatcgcggtgctgctgctgtcgtggatcatcacgctgtacacgctgtggcagatggtggagatgcacgagatggtcccgggcaagcggttcgaccggtaccacgagctggggcagcacgcgttcggcgagcggctgggcctgtggatcgtggtgccgcagcagctggtggtggaggtgggcctcaacatcgtctacatggtcaccggcggcacgtcgctgaagaagttccacgacacggtctgcggcgacgacgaccaccggtgcaagggcagggacatcaagctcacctacttcatcatgatcttcgcctcctgccacttggtgctctcccagctccccaacttccactccatctccggcgtctccctcgccgccgccgtcatgtcgctttgctactcgacgatcgcgtggatcgcgtcggcgcagaaggggaagtcgccggacgtgcactacggcctgcgcgctacgacgacgccggggaaggtgttcggcttcttcggtgcgctgggcgacgtggcgttcgcctacgcggggcacaacgtggtcctcgagatccaggccaccatcccgtccacccccgacaagccgtccaagaagcccatgtggaagggcgtggtggtcgcctacgtcgtggtcgccgtgtgctacttccccgcctcgctcgtcggctactgggccttcggcgacggcgtcgacgagaacatcctcgtcacgctcaggaaacccaagtggctcatcgccctcgccaacgtcatggtcgtcgtccatctcattggcagctaccaggtgtacgcgatgccggtgtttgacatgatagagacggtgctggtcaggaagtttgggttccgtccgagcctcatgctccgcctcgttgccaggagtgtctatgtcgggttcacaatgttcgtagccatcaccttcccattcttcagtgcattgctcagcttcttcggtggattcgccttcgcgccgaccacgtatttccttccttgcatcatgtggctgacaatatgcaaacccaagactttcagcatctcatggtttaccaactggatctgcatcgtcctaggtgttctgctgatggtactgtcaccgatcggtgggcttcggcagatcatcttgagagccaagacataccacttctaccaataaagtcgattcatttaacacccaaaaaaaccaaggtttgcgtcagatttattttgcagatgctcagcgtgtgtgtctcgagttttgaatcggacttcatcacctttatctccatcatggc

SEQ ID NO: 4354 - DNA, 1663 bp, Sorghum bicolor
acgaacacacgacgacttcaactttctgctccctctgctctgtgctctccgactccgatccctttccatcgctgaaggctccccggcgtccacgtccatcgtcgtcgagatgaagcaggcccgtccgccgccgcccatggagatgcgaccaccgccgaccagggagatgcgaccaccgtcgcccatggaagacgaggcgatcgacggctggcttccgatcaacgcgaggaggaacgccaagtggtggtactccgccttccacaacgtcaccgccatggtcggcgccggcgtgctcggccttccctacgccatgtcccagctcggctgggaggtcggcatcacggtgctgatcctgtcgtggatcattacgctgtacacgctgtggcagatggtggagatgcacgagatggtgccgggcaggcggttcgaccggtaccacgagctggggcagcacgcgttcggggagaagctgggcctctggatcgtcgtgccgcagcagctggtggtggaggtgggcctcaacatcgtctacatggtcaccggcggccagtccctgcagaagttccacgacgtggtctgcgacggcaagtgcaaggacatcaagctcacctacttcatcatgatcttcgcctcctgccacttcgtgctctcccagctccccaacttccactccatctccggcgtctccctcgccgccgccgtcatgtcgctttgttactcgatgatcgcgtgggtcgcgtcggcgcacaaggggaagtcgccggaggtgcactacggcttgcgcgcgacgacgacgccggggaaggtgttcggcttcttcggcgcgctcggggacgtggcgttcgcttacgccgggcacaacgtggtgctggagatccaggccaccatcccgtcgacgccggacaagccgtccaagaaacccatgtggaagggtgtcatcgtcgcctacatcatcgtcgccgcgtgctacttccctgtctcgctcgtcggttactgggccttcggcaacagcgtcaatgagaacatccttgtcagcctcagaaaaccaaagtggctcgtcgccatggctaacatgatggtcgtcgttcatctcattggcagctaccagctctatgccatgccggtgtttgatatgatagagacggtgttggtgaggaggtttcggttccgtccaagcctgatgctccgcctgattgctcggagtgtctatgtcgggttcacgatgttcgtggccatcacattccctttcttcagtgcattgctcagcttctttggtggttttgctttcgcgccgacaacttattttcttccttgcatcatgtggctcacaatatgcaagcctagagcttttagcatctcatggtttactaactggatttgcattgttctaggagtgttgttgatggtactatcaccacttggtggacttcgacaaatcattttgacagccaagacatacaacttctatcaataaatatatgattaattcaacataaaatccaaggaatggaatcgatcatatatattcaaagcttgttccagttgctcatgatgatttatgacatgtcgtgattttgtaaattatggcttaacctaaaaattagttttgatttaccatgtatatgtgtatatcttatttgtctatattctacgagttggctta

SEQ ID NO: 4355 - DNA, 1988 bp, Sorghum bicolor
aaactccattgctctctctgatcttttggcattggcagcatccattatccaatcgtgcgtgtgcgttaggtgatggcggcagtccagccgtccatggagacgacgcagcaagggccgccgccggcggccaactattctccggccagggatggcggcaggagcgccgaggagaaggcggcggagatcgacaactggctccccatcaacgcgtcgaggaacgccaagtggtggtactctgcgttccataacgtcaccgccatggtcggcgccggcgtgctcggccttccctacgccatgtccgagctcggctggggcgctggcgtcacgattatgatcttgtcatggatcatcacgctgtacacgctgtggcagatggtggagatgcacgagatggtccctggcaagcgcttcgaccggtaccacgagctcgggcagcacgcgttcggcgagcggctgggcctgtggatcgtcgtgccgcagcagctcgtcgtcgaggtcggcgtcaacatcgtctacatggtcaccggcggcacgtcgctgaagaagttccacgacaccgtctgcgagagctgcaagcaactcaagctcacctacttcatcatgatcttcgcctccgtccacttcgtcctctcccagctccccaacttcaactccatctccggcgtgtccctcgccgccgccgtcatgtcgctcagctactccaccatcgcgtggggcgcgtcggtggacaaggggaaagcggcgaacgtcgactacgggatgcgcgcgacgacgacgcctgggaaggtgttcggtttcttgggagcgctaggcaccgtggcgttcgcctacgccgggcacaacgtggtgctggagatccaggccaccatcccgtcgacgccggagaagccgtccaagaagcccatgtggaagggcgtcgtcgtcgcctacatcgtcgtcgcgctgtgctacttccctgtgtcattcgtcggttactgggcctttggcaatactgttgacagcgacatcctcatcacgctctccaggcctaagtggctcattgccctcgccaacatgatggtcgtcatccatgtcattggcagctaccagatttatgcgatgccggtgttcgacatgatggagacggtgctggtgaagaagctgcggttccctcctggcctgatgctccgtctgattgcccgtactgtttatgttgcgttcacaatgttcatagccatcaccttccccttttttgatggattgctaagtttctttggtggattcgcgttcgcaccgacaacttatttccttccctgcatcatgtggctcgcaatctacaagcccaaaaggttcagcctctcatggttcaccaactggatctgcattattcttggagtgcttctgatggtactggcgccgattggaggactccggaacatcattattagtgccaagacataccatttctaccagtaaacatgcatgattgtccaacacagtgcaaaccccttgtttaaccaactacaacagagaccctgacaagtctcaggccacatcatcaggtgaacaggttttggattttgtaccacgggattctgaactacttgtttggaatgacaaaaagcttgcatcagatgcgctaatcggcaatcgattataatgtctattgtgagttctttgtcgtgccaaaaagggaataccatcatggcctaaaacgtgttccagttgatgaatgttcctgacatgtcaagcttcccttagtcatggcctaacctaggagtttgcttggagtggattatatacatgtgtatgtagtttttcttcatacttctttatattcagggaatgttagcttttttgtatgtataaacgcgaaaatggaagcgtggtgctttgtattttttttagagaatggaaatggtgctttgtatctgttggtttttttgagtaatttagggagagtttccccgcattttcagtcaattaataaaaaaatacaatgatgatca

SEQ ID NO: 4356 - DNA, 2007 bp, Zea mays
aactatgacccctgctgcctttccatcttcctcgatctccctagctcgctctccaatctcccatttctctctctctctctctcgtcttcgccatccaccatccatcccgtcgtcgtgatagatggcggcagtccagccgtccgtggagatgacgacgcagcaagggccgccagccgccagctattctccggccagggatggcggcggcggcaggagcgccgaggatgaggagaaggagaaggcggcggcgatcgacaactggcttcccatcagcgcgacgcggaatgccaagtggtggtactccgccttccacaacgtcacggccatggtcggcgccggcgtgctcggcctcccctacgccatgtcccagctcggctggggtgccggcatcacgatcatgctcctgtcgtgggtgatcacgctgtacacgctgtggcagatggtggagatgcacgagatggtgccggggaagcggttcgaccggtaccacgagctggggcagcacgcgttcggggaccgcctgggcctgtggatcgtggtgccgcagcagctggtcgtcgaggtgggggtgaacatcgtgtacatggtgaccggcggcacgtcgctgcagaagttccacgacgtgctggtgtgcggcgacgcggcgtgcgagggcgggcgcaagatcaggctcacctacttcatcatgatcttcgcgtcctgccacttcgtgctggcgcagctgcccaacttcgactccatctccggcgtgtccctggccgccgccgtcatgtcgctcagctactccaccatcgcgtggggcgcgtccgtgagcaaagggcgggtccccgacgtggactacggcctcagggccaccacgccgccgggcaaggtgttcgggttcctgggcgcgctcgggaccgtggcgttcgcctacgcgggccacaacgtggtgctggagatccaggccactatcccgtccactcccgagaagccgtccaagaagcccatgtggaagggcgtcgtcgtcgcctacctcgtcgtcgcgctctgctacttccccgtctcgttcgtcggctactgggccttcggcgacagcgtcgacggcgacatcctcgtcacccttaacagacccaggtggctcatcgccctcgccaacatgatggtcgtcatccatgtcattggcagctaccagatctatgcgatgcccgtgttcgacatgatagagacggtgctggtgaagaagctgcgcttccctccaggcctcacgctccgtctcattgcccgtactgtctacgttgcgttcacaatgttcatagccatcacgtttcccttcttcgacgggctgctcagcttcttcggcggattcgcgttcgcgcccacaacctatttccttccatgcatcatgtggctcgcaatctacaagcccaaacggttcagcctctcatggttcaccaactggatctgcatcatccttggagtgcttctgatggtgctggcgccgattggagggctccggcagatcattatcagcgccaagacatacaagttttaccagtaaacattgcacaattatcgtgcaaaaaacaacgcaaaccccttgcttcaccagtaactgacagacaagtcttgttaggccatatataccatgttacgatcagctgacacaggttctggattttgttccatgagggcttccaactccttgtttaatttggcacgacaaaaagctcgcaccgggtgctctaatcggcggccgattacagcgtccagtgcgagttctttgccgtgccaaaattgaaagggggtcggctcggatgccggggcatgcatacaggacctagaacccgtttcggttgatgagaatgttcctggcatgtaatgcttcccttgttggttgtggtctaacctaggagtttgctttgagtggatctttgtacaattgtacgtgtatatgatgtttttttcccttcttcatacttgtttacattattcaggggaattggatcttaaaaaaaaaaaaaaaaa

SEQ ID NO: 4357 - DNA, 1580 bp, Zea mays
cccagacccagagcttctcttctcaaaagatgcaggagcaggacgtggacgatggcggcggcaggacgacccagcagcaggagaagtcgatcgacgactggctccctatcaactcctccaggaaggccaagtggtggtactccgccttccacaatgtcaccgccatggtcggcgccggcgtgctcggcctcccctacgccatgtccgagcttggctggggccctggcatcgcggtgatgatcctgtcgtggataatcaccctatacacgctatggcagatggtggagatgcacgagatggtgcctgggaagcggttcgaccggtaccacgagctcgggcagcacgtcttcggcgacaggctgggcctctggatcgtggtgccgcagcagctggcagtagaggtgagcctgaacatcatctacatggtcaccggcggccagtccctcaagaagttccacgacgtcatctgcgacggcggcaggtgcggcggcgacttgaagctctcctacttcatcatgatcttcgcctccgtccacctggtcctctcccagctccccaacttcaactccatctccgccgtgtcgctcgccgccgccgtcatgtcgctcagttactccaccattgcgtggggcgcgtcgctgcacagagggaggagagaggacgtggactaccacctgcgcgccacgaccaccccagggaaggtgttcggcttcctgggaggcctaggggacgtggcgttcgcctactcggggcacaacgtggtgctggagatccaggccaccatcccgtccacgccggacaagccgtccaagaaggccatgtggaagggcgcctttgtcgcctacgtcgtcgtcgccatctgctacttccccgtcacgttcgtcgggtactgggccttcggcagcggcgtcgacgagaacatcctcatcacgctctccaagcccaagtggctcattgccctcgccaacatgatggtcgtcgtccatgtcattggcagttaccaggtttatgccatgccggtgtttgacatgatagagacggtgctggtcaagaaaatgaggttcgctccgagcctcacgctccgtcttattgcccggagcgtctatgttgcgttcacaatgtttctaggcatcactttccccttcttcggtggattgctcagtttcttcggcggattagccttcgcaccgacaacttattttcttccctgcatcatgtggctcaaggtttacaagcccaaacggttcggcctttcatggttcatcaactggatctgcatcgttattggagtgctgctgttgattctgggtccgataggagggctccggcagatcattttgtcagccaccacatacaaattctaccagtaaaatcgatcaactggagtcgtatggcgtggctgttttgttagcattacatttcttagggtggattggcttttaatgtacacgagcgagtgagattgatgctagtagctcctaggagtatatatatttctatcatccacagagcttaatgtatcttgtagttgggacattaaaagagcaagtaggctttactcgctaaaaaaaaaaaaaaaa

SEQ ID NO: 4358 - DNA, 3919 bp, Oryza sativa Indica Group
caaaactttgtaatctcagcctagttttgtatccccaaatcattattagataatcatgcatcactctaagtgtgctctacttgatataaaagtattactgtcgttaggtgagcttggcgtggtaggtaaaaaaaatttctatcctcctgaggtgtcattgataagcatcagatagctcatagcattgactctattgcaaagtggccatgtgataaagtcaactgccaataagaaaataaatcactagttcagtctcatgtttgcattataattttcaaacatggcgtgtcattgaattgaaaagtcctgccactgatctgtcacttgtctattagtgttgtgattgtatgaagattttttttaagataatctaacttgcctccacagtccatggtggagctttgaaaatcatgccccttgattagtgagttttttattctgacaaaatatatttgcatctctcaatggataaatccgacaaaataaaagaaagaatcaatacacataagtatccattctaaacctagtcattttgctctccttaaaaatatatatgtgcagagtctcaacctataaatcattgaaaaaaaaaaagaaagcatcaatacagataattatctattctaaacttagatattttgttcttcttaaaaataaaaaaatatatttgcaaagtctcaactgataaatcatactccataatttatcaaatgatatatatgtttgttctacaaatatttatacaaaacacctatcctataggaattctactataggataagtaaagcatcaacacataattatccattctaaacttagccatttttgttctccttgaaaacaaatatataaatttgcaaagtctcgcttgataaatcagacagaaaaagaaagcatgaacgcgcataattatccgttctaaacttagccaggcattcaagaattaaaggtttacagaattggcgacgacgttatagcacattgaaaagtattaaaagcattactcgaatgattcgaaatctcgattttcaaaaaacgtaagaatagaaactttgaaatggcgaattattggcccaacaaagatattccgtttatgggacaacttgctacttttccatgttgctaaaaaccgaaagtgaaaaatgcgaaacaatttgggaaaaatttcccgattcggcgtacatattgatgtataaagaagagccgaattcttcagaacaagaagaagaacaaacctttcttgcatagagtgtagtctgtactagtactgttgagatcaaccatctgtagcaaagtagcaagcttgaattaatcaatggcgaaacaatggtggcaggatggccggagcgcgcaggagaaggcgatcgacgactggcttcccatcacgtcgtccaggaacgccaagtggtggtactccgccttccacaatgtcaccgccatggtcggcgccggcgtcctcagcctcccctacgccatgtccgagctcggctggtcagtcctactatcttcttcatcttcatctgaacgaagaacacacgaacgaaccaagaaattaatctaactgaattcttgaatttttgcaggggacctggcatcgcggtgctgatcctgtcatggatcatcacgctctacacgctgtggcagatggtggagatgcacgagatggtgcccgggaagcggttcgacaggtaccacgagctcgggcagcacgcgttcggcgagaagctgggcctctggatcgtggtgccgcagcagctcgtcgtcgaggtcggcgtcaacatcgtgtacatggtcaccggcggcaagtcgctgaagaagttccacgacgtgctctgcgagggccacggctgcaagaacatcaagctcacctacttcatcatgatcttcgcctccgtccacttcgtcctctcgcagctcccaaacttcaactccatctccggcgtgtccctcgccgccgccgtcatgtcgctcagctactccaccatcgcgtggggcgcgtcggtggacaaggggaaggtggccgacgtcgactaccacctgcgcgccacgacgtcgacggggaaggtgttcggcttcttcagcgcgctgggcgacgtcgcgttcgcgtacgcggggcacaacgtggtgctggagatccaggcgaccatcccgtcgacgccggagaagccgtccaagaagccgatgtggaagggcgtcgtcgtcgcctacatcatcgtcgcgctctgctacttccccgtggcgctcgtcggatactgggcgttcggcaaccacgtcgacgacaacatcctcatcacgctctccaggcccaaatggctcatcgcgctcgcaaacatgatggtcgtcatccatgtcatcgggagctaccagatctacgccatgccggtgttcgacatgatcgagaccgtgctcgtcaagaagctcagattccctcccggcctcacgcttcgcctcatcgcaagaacactctacgttggtaagcactgttcaagtgttcatcatctgaacttaactgaattttttattagatcttggcatggctgaaactgatctggaatctgtgcagcgttcaccatgttcatcgcgatcaccttcccgttcttcggtggattgcttgggttcttcggtggattcgccttcgcgccaactacttacttcgtaagttttccattgatcatttcgttttgatgggtgagagtctgagagatgatcagagttcagaactgacggttatttttttctgtgttctttggcagcttccctgcatcatgtggctagcaatctacaagccaagaaggttcagtctctcatggttcaccaactgggtaagaacacacaaactaattatgctctgtttttcttcaatcttctcccctgtttttgtctgaaatgaaaatgcctctgcttgatcttgcattctgatctgatttgtttttttcaactgattctctttcagatctgcatcattcttggagtgatgctcatgatcctgtcaccaatcggaggactccggcagatcatcatagatgccaagacatacaagttctactcgtagattacatgttcatcatagtaatctcatgtggctgcaagttcaagttctactcataggcacacatgatgaaaccagttactgcaaaagttttttttttagccaacaaaggaagaagaaagttcaacaccaagttcatacattgtcactacgacgatgatcttttgagacgtgtcatgcatgcatcagtcgttaattatgtgacttaattaaaaacaaagaggttgtgtttgtgcattgtcgctgggttaatcatactgtgtttttatatttcaatctactattatattgtaggctggacatggaaactgtgtgcagaaagatgaaagggatggataattactggttgattcttttgctttcaagtctactgcgtgtacatatttaccacatgctgcgattttttaccctgaatcttggcatgctgccctaaaaccgcaacttcggattatcaccgtaatcgatcggatactgccaagtgccaacagttgaaactagcaccagttttactcttatcacctttaccaacagttgaactagttatcatgaaatttgggtttttttaaaaaaaagctgaatgggcctttggttttaagtttgtaatacaaaataaattgaaagttctacatggatccaaccaacatttggatgaagagaatgcgtaccattctcaaacattgaaccccgaaagtttctcagaaactagccactcacatcactgactgccaacaagaccttccaaatatatttctaacctaatccaaaaaaagaaaaaggttgatttccacagtaacacaagggtaagcttttgggcagtagtaggatggcacatacatccggatgaataaaagctagtgcatgcataatggg

SEQ ID NO: 4359 - DNA, 1341 bp, Sorghum bicolor
atggggactcaagcacccgagaaccattctcctaccaaggatgagaggagtgctggggataaggcgatcgatgactggctcccgatcacctcgtccaggaatgccaagtggtggtactctgccttccacaacgtcaccgccatggtcggcgccggcgtgctcagccttccctacgccatgtccaagctcggctggggacctggcattgtggtgttgatactgtcgtggatcatcacattgtacacgatgtggcagatggttgagatgcacgagatggtccccgggaagcggttcgatcggtaccatgagctcgggcagcacgcgtttgggcagaagctgggcctgtggatcgtcgtgccgcagcagctcatcgtcgaggtgggcggggacatcgtgttcatggtcaccggaggcaagtcactgaagaagttccacgacgtgatctgcgacggcaagtgcaaggacatcaagctcacctacttcatcatgatcttcgcctcctgccacttcgtcctctcccagctccccaacttcaactccatctccggcgtctccctcgcagctgctgtcatgtcactcagttactcaacaatagcttggggagtgtcgctgcataaggggaagttgccggacgtggactaccacgttctggcggcgacgacatcagagaaggcgttcaactactttggggcattgggggatgtggcgtttgcatacgcggggcacaatgtggtgcttgagatccaggccaccatcccatcgacgccggagaatccatccaagaagcccatgtggaagggtgtcgtcgtcgcctacatcatggttgccgtctgctacttccctgtctcattctttggatactgggcctttggcaaccaagttgatgataacatcctcatcacactcaacaaacccaagtggctcatcgccctcgccaacatgatggtcgttatccatgtcattggcagctaccagattttcgccatgccggtgtttgacatgatagagacggtcctggtgaagaaactgcatttccctcccggccttgcactccgtttgattgcccggagcacctatgttgcgttaacaacgtttgtagccatcactatccccttcttcggtggattgctcggtttcttcggtggattcgcctttgcaccgacaacttattttcttccctgcatcatgtggcttgcaatctacaagcccaaaaggttcagcctctcatggttcaccaactgggtctgcattcttcttggagtggtcctgatgatcctggcaccgatcggagcactccggcagatcatcttgtctgccaagacataccgattctactcctaa

SEQ ID NO: 4360 - DNA, 2023 bp, Zea mays; identical to SEQ ID NO: 1101

SEQ ID NO: 4361 - DNA, 1815 bp, Hordeum vulgare subsp. vulgare
cggagagtccccgtcgcggcggcggccaaccccgtccaggcgagagatgtcggaccgccgggagaagcggccgtccgacgcggccgacgccgccccggaggccaagcgcgcccgcgagccggctgccccggcgttccccacgtacaaggacgcgcccgacctagcccccaagatccgcctcctctgcgagatcctggcctcctccgcgtccgacgtggaggcggccctcgacgacgccgacgtccgcgtcaccacctccgacgtcgagcaggtgctccgcttctcctacgcgcacccgcgcggcgccgccgccttcttccgctgggcgggccacagacacctgcaccaccagcactccccctactcgtggaacctcgtcatcgacctcctcggcaagaaccgcctcttcgaccccatgtgggacaccgtcggctccatgcgggcccagggcctgctctccctagccaccttcgcctccatcttctcctccctcgccgccaaccccaccagctcccccctcaaggcgtttgtcgaaatgccgaggtacggcatggaccgcgacacgcccgcgctcaactccctcctgtccgcgctttgccgagcctccaggctcgatgacgcccgcgccgccatacccgtggcacgcgctgaggccggcactcggccggatgccgactcctatgcaatccttctggagggttgtgaggctgccggcaacgctgccgttgcacgcgaggtgtttgacgaaatggtgcacgcgctcgacttcgatcctgccaatgtgcctgcgtacgactctttccttacaacactagtttcaagtggctcctccacggcgctctcggatgcgatggagtatctggctgtcttgcgccggtacaggtgctcaccgggggagaagttcctccgtgctgcactggccgcataccttgaggcacgcgaactgcgcagtgctgtggttctctgggatgaatttgtccttcgtcgggggctcgtcccagataaggaaatgtacaccacaatgatcatgttgcagggcactctggggcatgctgaggttactgtgaaataccttgatgaaatggccatctatggagtgtttccggacgcagacacatacaatgtggtactcaagttattgctgaaagggaggaagctccgggaggcatcagcaatatttaaagagatggtcaagaacgagtgttggccaaatgaggcgaattgttcacttgcactcggcatgttcttggatactcgtgactgggacacagggatcaaggtgtggaaatgcatggcggcgaatagcctgcctccactggaggagggcgggaatatgcttgtatcgaagctgaaggatgagatgttgcctgaggcatgcaagtatgcagaggacatgatcgatcagggtatcaagttgagctcgtcaacgctgacaaagctgaagcacagcctaggaaaggtcaagaaaggagccattcacgaccgcttatttgcaaaatggaaggcgcactaggttcttctctcttactccctccgtcacataatgtaagacattttttgacgctattgtagggagcatatcatatactgtatgggtttgggttatgtaggactgggaataggagatgactctcttcagttaaccatttcatggtgacttattttgctggaaccataggaagttgtgcatatactgtttgcagatgcggcaatttagttctgtaaactaggtgtgcaatgtaacatgtcaggttagaagtggtttagcaactgaggagtgcagtctcctaacatggtaatgaacctctttgtcgc

SEQ ID NO: 4362 - DNA, 1814 bp, Oryza sativa Japonica Group
ggatagggcaaaaaccccacctctggactttggccacctctctcctcccccaattccaccactagccctcgtgtccccggcgcggcggcggcggcggcgatgcctgaccagcggccaaagcggccgtccgactcggtcgccgccgcctcgccggcggcgaagcgcgcccgcgacccgtccgcgccggcgttccccacctacagggacgcccccgacctgcccccgaagatccgtctcctatgcgagatcctggcgtcctcggcacccgacgtcgacgcggcgctcgacgacgccgacgtccgcgtcacctcctccgacgtcgagcaggtgctccggttctcctacgcccacccgcgcgccgccgtcgccttcttccgatgggcggggcaccggcacctccgccaccagcactccccctactcgtggaacctcgtcgtcgacctcctcggcaagaaccgcctgttcgagcccatgtgggacaccgtctcctccatgcggacccagggcctgctctccctggccaccttcgcctccgtgttctcctccctggcggccaacccggccagctccccactcagggcgttcgtggagctgccgatgtacggcatggaccgcgacacgccggcgctcaactccctcctctccgcgctctgccgcgcctcccgcctggacgacgcccgcgccgcgatccccgtggcgcgcgccgaggccggcacccgccccgacgccgactcctacgccatccttctggagggctgcgaggctgccggcgaccctcacgttgcacgcgaggtgttcgacgagatgcggcacgtcatcggattcgatcctgccaatgttcctgcctatgattctttcctcactacactgatttcaagtggttcctccacagcgttaatggatgcgatggactatcttgctatcttgcaccggcagaggtgctcacctggggagaagttcttccgcgccgcactggccgcacacctcaaggcgcgtgaattgcgcggcgcggtggtgctctggaacgactttgtcgtaaggcggggactcatcccagataaggaaatgtatagcacaatgatcatgctgcagggcactcttgggcatcctgaggtgattgttgagtaccttgatgagatgacctttgatggagtgtttccagatgcggacacatacaatatggttttccagttcttgctgaaggggaggaaactccgggaggcgtcggcaatatttagtgagatggtcaagaacgagttctggcccaatgaggcaaattgttcgctcgcgcttcgtatgttcttggatacacgagactgggattcagggatcaagttgtggaaatgcatggtggagaatgggcttccaccattggaggagagtgggaacatgctcgtatcaaagctaaaggatgagaggttacccgaggcatgtaaatatgcagaagacatgattgatcgatgtatcaagttgagctcttccacaatgtcaaagctgaagcaatgtctgatgaaggtttataaaggacatatccacgatcacctacttagaaaatggaaggcgcactaggtatttttacctcttctttgtggttaaatataacaggggaagaaaagctaacattttgcccccaagtagctgagtagcggttgatggtgattttctggttgcaactgcaactataggaacattatgcgcatagcatcagtaaaagttgcaaagcattggctcaaagctaggtgtacaatgtagtgacatatttggtaaggtagtttggtaaattaaacttgactctcctaatgtttttcttttgc

SEQ ID NO: 4363 - DNA, 1380 bp, Sorghum bicolor
atggtgggctccggcgcggctgcgggcggaggaggggatcacgcgcggagcaaagaggccgcggggatgatggcgctccacgaggccctccgcaacgtctgcctcagctccgactggacctactccgtcttctggaccatccgtcctcgcccgcgctgccgcggcggcaacggctgcaaggtcggcgacgacaacggcagcctgatgctgatgtgggaggacggattctgccggccgcgggtggcggagtgcctggaggacatcgacggggaggacccggtgcggaaggccttcatcaagatgtccatccagctctacaactacggagaagggctgatgggaaaggtggcctctgataaatgtcacaaatgggtcttcaaggaaccttctgaatgcgagcccaacatctccaactactggcagagctctttcgacgctcttcctccggaatggaccgatcagttcgcatcaggcatccagaccatagccgtgatccaagccgggcatggcctcctgcagctgggctcttgcaagattatacccgaggacctgcacttcgtgctgcggatgcgacacatgttcgagtcactgggctaccagtcgggcttcttcctctcccagctcttctcgtcctcgcggggcgcctcgccgacgccgccgttccccctcaagcagcagccgcctccggccgccgcgcgtgctccgcagcagctcttcaactgggcaggacaccaccagccgcagctcccgccgtcgccgggcgcgggagcgtcgccgctcttcccgcccggcccgggcgcgtttcacccgtcgtcagccgcgcggtcaatgccgccgtacccaggcggcggcaaggacgagggcggccacatgttccacctcccagcggcgcaccatggcagcagcaagccaccgcacatggacgagcaccagcagacgatgggccccggtggcgaagcgcccgacggcgagctccggtggcccaacgggctgtccttcttcaccgcgctcaccgggcgagcggacgacgcgaagctgctgtttggtggccccggcggaggagccggcgccgcggacgacgagaaggcggcggcggacaacgcgcagaccgggcacggcggggccgagaacgtggaggagtacctgagcctggagagccactccaacaaggcgaggaaggtggagagcgccgcccagagcaccaagttcaagaggagcttcacgttgcccgcgaggatgggctcgtccacgtcgccgtcgccgtccccgtccgtgtcggcttccacggcgccggcgccgccacagcagcaagggatggagtaccgagggccacacgagggcggcgtctactcggacctcatggagacgttcttggagtag

SEQ ID NO: 4364 - DNA, 1734 bp, Zea mays
ggcggaagcgagggagcggcagctgcaggcaggggtgggggcagcaaaatggtgggctccggcgcggctgggggcggagcggatcacgcgcggagcaaagaggccgcggggatgatggcgctccacgaggccctccgcaacgtctgcctcagctcggactggacgtactccgtcttctggaccatccgtcctcgcccgcggtgccgcggcgggaacgggtgcaaggtcggcgacgacaacggcagcctgatgctgatgtgggaggacggcttctgccggccgcgggtggcggagtgcctggaggacatggacggcgaggacccggtgcgcaaggccttcatcaagatgtccatccagctctacaactacggagaagggctgatgggaaaggtggcctctgataaatgtcacaaatgggtcttcaaggaaccttctgaatgcgagcccaacatctccaactactggcagagctctttcgacgcacttcctccggaatggaccgaccagttcgcatcaggcatccagaccatagctgtgatccaagccgggcatggcctcctgcagctgggctcctgcaagattatacccgaggacctgcacttcgtgctgcggatgcgacacatgttcgagtcactcggctaccagtcgggcttcttcctctcccagctcttctcgtcctcgcggggcgcctcgccgacgccgacgccgccattcccgctcaagcagccgccagcagctccggccgcgcgcgccccgccgcagctcttcagctggccgggccaccaccagccgcagcagctcccgtcgcccgcgggagcgtcgccgctcttcccgcccggcccgggcgcgttccacccgtcctccgcgcgcccaatgccgccgttcccaggcggcaaggacgagggccacatgttccacctcccgccagcggcgcaccacggcaccaacaagcagccgccgcagcacatggacgagcaccaccaccaccagcagcagccgatggtgggggccggcggcgacgcgcccgacggcgacctccgctggcccaacgggctgtccttcttcaccgcgctcaccgggcgcgcggacgacgcgaagctgcttttcggcggccccggcgctggcgctggcgctgcggacgacgacgacaaggcggcgccggacgcgcacggcggggccgagaacgtggaggagtacctcagcctggagagccactccaacaaggccaggaaggtggagagccccgcggcccagagcaccaacaagttcaagaggagcttcacgttgcccgcgcggatgagctcgtcctcgtccacgtcagcgttcccgtccgtgtcggcctccacggcgccgccgcagcagcagcaagcagggatggagtatcgagggccgcacgagggcggcgtctactcggacctcatggagacgttcttggagtagctatagctagctagatcccgtagcatgcatgatcgatcggttcagggtcacacactacgacaagcgtacgctgctttttgtttctcaccgccctccgtcccaagctttgtttcaggtttggagttttaatcgcataatatgtttaattagatttgtgtgtgtatttttttaattttcatcgtgtttcccccctattccagtagttgtcgtagctgctagctagatcgtaatgcacaaaaaaatggtggagtacatgcatgcatgcatgcaagaagagcatgagttgcttccatt

SEQ ID NO: 4365 - DNA, 1950 bp, Hordeum vulgare subsp. vulgare
gaaggactgcaagacagaccgagcgtctgcgtctgcgtctgcgtctgcgtgtgtgtgtgagagagagagtgagaggtagtagctcgctcagcgaagctacgagcccgcccacagtccctctggactggactctctctctccacggggagaaaaaacccaagaagcgatcaaaaagagcctcggccgggtagctagaaggcgcaccctacccctagcccccccgagctccgagggtttttacgacgccaagggagggagggaaggagagagaggtaagaagggggggaaaatggtgggctcgggggcggcaggagggggaggaggggatcacgcgcggagcaaagaggccgcggggatgatggcgctccacgaggcgctccgcaacgtctgcctcaactcggactggacttactccgtcttctggaccatccgtcctcgcccgcggtgccgcggcggcaacgggtgcaaggtcggcgacgacaacggcagcctgatgctgatgtgggaggacgggttctgccggccgcggatggcggagtgcctggaggacatggacggcgaggacccggtgcgcaaggccttcagcaagatgtccatccagctctacaactacggagaagggctgatgggaaaggtggcatctgataagtgtcacaaatgggtcttcaaggaaccttctgaatgcgagcccaacatcgccaactactggcagagctcttttgatgcccttcccacggaatggacggaccagttcgcctccggcatccagaccatcgccgtgattcaagctggccatggcctcctgcagctgggttcttgcaagatcataccggaggacctgcacttcgtgctgcggatgcgacacatgttcgagtcactgggctaccagtcaggcttcttcctctcgcagctcttctcctcctcccggggcacctcgtccacgccctccttcccgctcaagcagccgccgccgccggcgcgcccgcccccgcagctcttcaactggccgggccagccgcagctcccccacgccgccgcctcgcccctgttcccgccgggaccggccgcgttccacccgtccgcgcggtcgtcgatgccgcattacccgggcaacaaggacgagagccacatgtaccacctcgcgccgtctcagcatggcaagccgccgcacatggacgaacaccagcaccaccagcagcagatggcgcccggggagacgcccgacggcgacctcaagtggcccaacgggatgtcattcttcaccgcgctcaccgggcgctcagatgacccgaagcttttgttcggcggtcccggaggtggaggtggcggcgcggacgacgggaagccggcgcaggacgcgcagacagggcacggtggtgcggagaacgtggaagagtacctgagcctggggagccactcgaacaaggcgaggaggatggagagcgcccagagcgccaagttcaagaggagcttcacgttgccggcgaggatgagctcgtccaactcgccgtccccgtccgtgtcggcctcgacggggccggcgccgccgccgcagcagcagcaagggatggagtacagagcgcagcacgagggcagcgtctactcggacctcatggagacgttcttggagtagcaacaacgcatgcacgcgtcgaccgaccgatcatccctacgacgacaagcgtacggactttacgttttcttgttcccactttttgttttgttccaaccaagctatacgttgaagctcttttagcgtcaggttttggagtttgcttccgcttcattagatcatgtaaccttttttttttccctcccttctagcttcgtacgtgtctcgatcgatctagtcgtagctagctagctcctagtgcaagaactgaatacacgcatgcatgcatgcatgcagagatgggcatgagtttgcttccatgatggctggcaagttct

SEQ ID NO: 4366 - DNA, 1726 bp, Zea mays
ctcaggttctcaagaaagaccctgcagggagagcgatcaaaaaggctgccggcacggccgggtagcagctacaactacaagctggcctatagctagctagctagctatagctgctacagccgccgagctcgatcctcggactcggactgcaacgaggaaggagaggaaatggtgggctccggcgcggatgggggcggcggaggggatgacgcgcggagcaaagaggccgcggggatgatggcgctccacgaggccctccgcaacgtctgcctcgactcggactggacctactccgtcttctggaccatccgtcctcgcccgcgctgccgcggcggcaacgggtgcatggtcggcgacgacaacggcagcctgatgctgatgtgggaggacggcttctgccggccacgggtggcggagtgcctggcggacatgagcggcggcgaggacccggtgcggaaggccttcatcaagatgtccatccaactctacaactacggagaagggctgatgggaaaggtggcctctgataaatgtcacaaatgggtcttcaaggaaccttctgaatgcgagcccaacatctccaactactggcagagctccttcgacgcacttcctccggaatggactgatcagttcgcatcaggcatccagaccatagctgtgatccaagccgggcatggcctcctgcagctgggctcttgcaagattatacccgaggacctgcacttcgtgctgcggatgcgacacacgttcgagtcgctgggctaccagtcgggcttcttcctctcccagctcttctcgtcggcgcggggcgcctcgccgacgccgcctcctccggccgcgcgtcccccgccggcgcagcttttcaactggccgggcgcccaccagccgcagctcttcccgcccggtccgggcgcgttccaccacccgtcggcgcgggcgatgccgccattgttcccaggcggcggcaaggacgagggccacatgttccacattccaccggcacaccatggcagcaagccactgcacatggacgagctccagcaccggcaccagcagacgatgggggccggtggcgaggcgcccgacggtgaactccggtggcccaacgggctgtccttcttcaccgcgctcaccgggcgagacgacgacgcgaagctgctattcggtggccccggcgccgcggacgacgagaaggcggcgccggacgcgcagaccgggcacggcggggctgggaacgtggaggagtacctgagcctggagagccactcggacaaggcgccgagcaaggtggagaacggcgcccagcacagcaccaagtccaagaggagcttcacgttgcccgcgcgggtgagctcgtccacgaccacgtccccgtccgtgtcggcctccacggcgccgcaagggatggagtaccgagggacgcacgagggcggcgtctactcggacctcatggagacgttcttggagtagctagctagatccgtagcatgcatgatcggttggttcaagccttcaaggtcactacaacaacaagtgcacgcttctttttttttcttttcctcaccgccctcccaagtcccaagctttgttttaggtctggagttttaatcgcataatatctttaattagatttgtatgttctttgtttttttcttcttttctcctcttcttggaaaaaaaattctttgcataccagatgcaaagcccaaaaaaaaaaaaaaat

SEQ ID NO: 4367 - DNA, 1259 bp, Zea mays
cgaccctcgcgccttcgcgagtctctctctttctctcgagtctcgacacaccacagcggaagcgrctcgactcgctgagtgacaagacgcgacgcgacgccaagccaagaccaaattaccaaaccctaccccttcgccgcgaccgcgatcccccacatcgttggcgatgagctcctcctccaacagcgggaagaagccggcgcccgccggcggccgcggggggcccaccatccgcacgctcgccgacataaaccgtggccctgccggtttcccaggtgccggaggsggcagcagcgatgacgacgagccccaggagtactacaccggcggcgagaagagtggaatgcttgttcaagatccaacaagaagaaatgacgtggatgcaatatttgaacaagcaagacaggcgggcgctatccatggaatgcccccttttcttggtggcgagtcttccagctctaggagctttactgggactggccgacttcttacaggggagacagtaccatctgctgcacctcaggaaccagtaccaattcgaatacgccacaatatacatttgtggaacaatggctttactgtggatgatggtccactgagatactacgatgatcctgaaaatgaagagttccttgagagccttaagatgtcaaagtgccccaaggagctggtgcctactgatggagaacatgttgatgtgtctgttattaaaaggatggaagattaccgggaacctgtaaggcctcaatcagctttccagggtgttggaagaacccttggtggtggaccttccccagatgagagtgcaacacctgctcctgcaccagcggcccctgctgcttcgaggtccgctggcatagtcgtggatgactcccagccatttacatccatacagctgaggctggctgacggcactcgcatggtcgcccggttcaacatgcaccacaccgtgggagacatcaggtccttcatcgacgcatctcggcctggaaccgcaaggccgtatcagctgcagacaggtttcccacccaagcagctggctgacccaasgcagaccgtggtgcaagctgggctggcaaactcggttatcatgcagaagatgtaatgtttcgacaacatgggtaactaggatgcatcgtactgcatcttttgagaactgtcttattgtggttgacatactgctctggtgcgtcattcatggtcttaatagtttatagttcatctatgaactgaattatgcttccaaaaaaaaaaaaaaa

SEQ ID NO: 4368 - DNA, 1329 bp, Sorghum bicolor
ctctcgacccaccaaagcagaatcggctcgactcgccgagtacacgcgacgcgacacgaaaccaaagcgcggaccgaaccctacccctccgccgcgaccccgatcccccacatcgtcggcgatgagttcctcttccaacggcggtaagaagccggctgccagcggcggccgtgggggccccaccatccgcacgctctccgacttaaaccgcgggcccgccggcttccctggcgccggaggtcacggcagcggcagcgacgacgacgagccccaggagtactacaccggcggcgagaagagtggaatgcttgttcaagatccaacaagaagaaatgatgtggatgcgatatttgaacaagccaggcaggcgggtgctctccatggaatgcccccttttcttggtgacgagtcttctggctctaggagcttttcagggactggccgacttcttacaggggagacagtgccatctgctgcacctcaggaaccagcaccagttcgaatacgccacaatatacatttgtggaacaatggctttagtgtggatgatggtccactgagatactacgatgatcctgaaaatgcagagttccttgagagccttaagatgtcaaagtgccctagggagctggtgcctactgatggagaacatgttgatgtttctgttattaaaaggatggaagattacagggaacctgtaaggcctcgatcagctttccagggtgttggaagaaccctgggtggtggaccttccccagatgagagtgcaacacctgctcctgctcctgcaccagcggcccctgctgcttcgaggtctgttggcattgtcgtggatgactcccagccatttacatccatacagctgaggctggctgacggcactcgcatggtcgcccggttcaacctgcaccacaccgtgggagacatcaggtccttcatagacgcatctcggcctggagctacaaggccttatcagctgcagacaggtttcccacccaagcagctggctgacccaatgcagaccgtggagcaagctgggctggcgaactcggttatcatgcagaagatgtaatgcttcggcaatctggggaactcggatgcgtcatactgcatcttttgaaaactgtcgtattatggttgatcatgttatcagatactggtttggcgcatcatttatcgttacagtagcatctgatgcctcattgtgagcttaagagtttataattcatctatgaactgaagtaatgctttctgatctacagcagatacttagtgccgagttaaagtttacacgtctggtcataatgaacaatcgttgcttgcacgact

SEQ ID NO: 4369 - DNA, 1007 bp, Zea mays
cagcgatgacgacgagccccaggagtactacaccggcggcgagaagagtggaatgcttgttcaagatccaacaagaagaaatgacgtggatgcaatatttgaacaagcaagacaggcgggcgctatccatggaatgcccccttttcttggtggcgagtcttccagctctaggagctttactgggactggccgacttcttacaggggagacagtaccatctgctgcacctcaggaaccagtaccaattcgaatacgccacaatatacatttgtggaacaatggctttactgtggatgatggtccactgagatactacgatgatcctgaaaatgaagagttccttgagagccttaagatgtcaaagtgccccaaggagctggtgcctactgatggagaacatgttgatgtgtctgttattaaaaggatggaagattaccgggaacctgtaaggcctcaatcagctttccagggtgttggaagaacccttggtggtggaccttccccagatgagagtgcaacacctgctcctgcaccagcggcccctgctgcttcgaggtccgctggcatagtcgtggatgactcccagccatttacatccatacagctgaggctggctgacggcactcgcatggtcgcccggttcaacatgcaccacaccgtgggagacatcaggtccttcatcgacgcatctcggcctggaaccgcaaggccgtatcagctgcagacaggtttcccacccaagcagctggctgacccaacgcagaccgtggtgcaagctgggctggcaaactcggttatcatgcagaagatgtaatgtttcgacaacatgggtaactaggatgcatcgtactgcatcttttgagaactgtcttattgtggttgacatactgctctggtgcgtcattcatggtcttaatagtttatagttcatctatgaactgaattatgctttctgatttacagcagatactgaagtgtcgatttaacgtttatgcatgtctggatat

SEQ ID NO: 4370 - DNA, 1421 bp, Zea mays
atgtgacagttcgggcaccgacgtccgtctccgtacttccggctgtgtgcgaaactgcgaacgcgtgatatctccgcgtacgcaaacgcgacgcgaaggtcagcacggacaactctacccctccgcctcgaccctgaccccccacctcgtcggcgatgagttcctcttccaacggcgggaagaagccggctcccggcggcggccgcaggggtcccgccatccgcacgctcgctgacataagccgtgggcccaccggcttcccaggtgccggaggcggcgacagcggcagcgacgacgacgagccacaggaatactacaccggtggcgagaagagtggaatgcttgttcaagatccaacaagaagaaatgatgtggatgcgatatttgaacaagccagacaagcgggtatcaaaggaatgcctcctcttcttgatggcgagtcttccagctctaggagctttacagggactggccgacttcttacaggggagacaatatcatctgctgcacctcaggaaccagtaccaattcgagtacgccacaatatacatttgtggaacaatggctttagtgtggatgatggtccactgagatactacgacgatcctgaaaatgcagagttccttgagagccttaagatgtcaaagtgccccaaggagctggtgcctactgatggagaacatgttgatgcgtctgttattagaaggatggaagattacagggaacctgtaaggcctcgatcagctttccagggtgttggaagaacccttggtggtggaccttccccagatgagagcgcaacagctgctcctgcatcagcggcccctgctgcttcgaggtccgctggcgttgtcgtggatgactcccagccatttacgtccatacagctgaggctggctgacggcactcgcatggtcgcccggttcaacatgcaccacaccgtgggagacatcaggtcctttatagacgcagctcggcctggagctgcaaggccttatcagctgcagacgggtttccctcccaagcagctggctgacccaacgcagaccgtggagcaagctgggcttgcaaactctgttatcatgcagaagatgtaaatgcttcggctggcaacctggggagctcggatgcatcgtactgcatcttctgaaaaccgtaatattatggttgatcatgttatcagatactgctctggtgcatcattctcagtcatggttacttacagtagcatctggtgcctcgttgggagcacaggagtttataattcatctaggaactgaagtatgctttcttgcatcactattgcatcacttttttcatttttaatattggtgttatgatatttcgtgtttccatggccgcttccttgcaagttgaagcgcgactcgcaagtcgcagcataatcaaaaaaaaaaaaaaaa

SEQ ID NO: 4371 - DNA, 1338 bp, Oryza sativa Japonica Group
tcgactcgccgagtacgcgacccgcgagccaaaccctaccttccaccccgcgacctcgatccccccacccccacccctcggcggcgatgagctcctccaacaacggcggtggcggcgacaagaagccggcgtccggcggccgcgggggccccaccatccgcaccctcgcggacatcagccgcggcccgtccggcttccctgggggcggcggcggcggcggcagcgactccgacgagccccaggagtactacaccggcggcgagaagagtgggatgcttgttcaggacccaacaagaagaaacactgtggactcaatcttcgaacaagctagacagatgggtgctctccaagatcaaccgcctccatttgaggatcaatcttccagttcaagaagctttacagggactggtcgacttctttcaggagagacagcaccagctgcacctccaccgcctgggaatgtacttcacaatatacaattctggaacaatggattcactgtagatgatggtccgctgagggactatgatgatcctgcaaatgctgatttcattgagagcatcaagaagtcccagtgcccccaggagttggagccagctgatagaagaacacctgttcatgtgaatgttatcaaacgactggaagactatcaggctcctctaaggcctccatcacccttccagggtgttggaagaacccttggtggtggatcttctgcagaagagagccaggcaccagctcctgccactcaagaaccccgcaggtccgttggaatagttgtggacgactcgctcccatttacatccatacagctaaggctggccgatggcactcgcatggttgcccgtttcaacatgcaccacacggtgggcgacatcaggtctttcatcgacgcctctcggcctggggctacaaggccctatcagctgcagactggtttcccgccgaagcagctggctgatccagcacagaccgtcgagcaagctggtctggcgaactctgtcatcattcagaagatgtaggcctaggggcacgtctcatatgctatctttgaaacaagaacccggtgtccttaaattgtcgattatcatgccagatactgtactggaatacattctgcatcgaaccagactgctggtttcatcgacagacagacgataacaatagccatgtcggtttttaagtggcatcagtgaagttcataatcctattaatagtaattacctgaattgcaacaaactgtcgtgcctcaatttgatcctgactaattgttgcttgaaaagctgttaactgttcatcgagatatatcatcaaatcattcgtgttcatttcaacttc

SEQ ID NO: 4372 - DNA, 4374 bp, Oryza sativa Japonica Group
accatccgcaccctcgcggacatcagccgcggcccgtccggcttccctgggggcggcggcggcggcggcagcgactccgacgagccccaggagtactacaccggcggcgagaagaggtattgatacccccgtatatataactttcctcggatcaatctagtttccgctgccgatttgatggtgatcgcgtcgtgcgttcgagcactgccgcgctggaacccttcccaccgctcgattgttgttgttacgacctagcttgatcctccgattagacagtctcgggagtgattcgttagtttttgggcttgttgagcggttgatctgtccatgttgtgtggattaggtttgtttcatttggttcaggaattgtgccgcatactgggcggttgttccgctgcccgcagaattctgactatatttccgaccaactcaggtgtaatggttacgaattttagtttggttttgctttttgctacttggtagtgtggaatatttttatgatcggatagattactttcatcattgtactattgaaactagagataaacttataggtttagattagatttgtaaaatccatgagatgacaaaatatgagtcatccactcaaaagacaattcatgcaaatggtttcatttcagttatctcgtgttttctgcaaaatatttttttacttgtgtggtgttcttgatcagtttgtggaatgattggatcatccaatcctaaaatcttaccctatcctacatttttttatttgggggaatgtgatacatttgtgacatgaccatgtcgtctgccaattcacgtaccatgaagtttactaatgaggaattgaacataataagcatgcgatagaacaactcctaaagtctggtctcttgtcaaacccaacgcccatattatagtttgaatgttttagccttttgcacatagtaacccccacgttcagcggtactttgcagcaaacattgaccattaatttgttgaaatgaaatttccggatttaatggtttgccagatcatcctttagtcctgaacctgtttattcaaacttccaattctgtcaagtatttctttgttcgtccaccttgctgcaacaatgaattcctatggtactgttattttgtatatggtgtccatatagctagcaaaatcgcacaggatcttgctgttatttggtttgcaattaatacatgttgagtgggttagctcttcattctttttagtgataccatgtggtttgcaaacaatatatgttgagtaggttccattttatgtgctaatgttaatgctagttttttctcctcagtagttctttatttttttaggctccatgctgttactacattttacccgtcagtacttttatgccatataatgtttctagcagcaacagactctgatgtactactgctgctgctgtgccagctgtgggatctgggaagctgctgttcagtttatcttgttgttgtataaccccctgaggtggtttcaacaggggttgagatcatttggcaaccattaggttcacaatcactgatgccaatagaacatcacagttttgaattcattgaacatattcttctaatgcttcatggctccagttgtactcagcaaagtgctctgtttttagtgcctcccatcataatggttttcgagcttataacccgatgccaaaatttgaattttaaaacataattttggagttgatttcgttttttttttgtattttattttatagcattggcttttgaattgctaagaacacatatgtaaaagttttacccacaaattattatgtataaaagttatggcttatatcagctgtaggacaagcaagggaaatagtgagaatttgatgaaggatttgacatcacatggcctgcttgtctaatctggttactgtcttttcttttgctataccatatatgagactcgttaaaggacaccttaaattttaatcatggtttaacatgagatgagcatctgttgtggtctgatattccaacatctggagattctggtgtgccagtgcaggcttttgcataacaacctaacctttgtagttcgtagccacacccacctcccttttttcttcatccaccaagtcccatctaatcatgcatcatgaataaaacacacctgagcttgttgacttttatatgttctgtataagtggatatggctacagagttaaggaccattggggaacagcaatttccctaatcagttatccgtgacttagtagatgtgcttttatgttttacttatttgccttaagtgacaaatatagtaatatagttttgggtccactcttctgcttttttgtgcaggacctcttgtgatgatcttatattaatattttattacttatgtatttttatgtatatatatgcagtgggatgcttgttcaggacccaacaagaagaaacactgtggactcaatcttcgaacaagctagacagatgggtgctctccaagatcaaccgcctccatttgaggatcaatcttccagttcaagaagctttacagggactggtcgacttctttcaggagagacagcaccagctgcacctccaccgcctgggaatgtacttcacaatatacaattctggaacaatggattcactgtagatgatggtccgctgagggactatgatgatcctgcaaatgctgatttcattgaggtgatttctcttgacttgttatttaggccaattttaccatacatcaatccaatggtgtcaatatgaactcattttgattctcttccgccattaattttgcataacttttgatgtttcaattttattgagaattgatatattggattgagagacatcctctaaaattacatcagttacaagctttactcttaccttcttgctttcatttgcccttctttttttttcccctgaaaaggagtaattactatagctctatgtccacccaccagatgatttcataggattgtagtaaaatgagtaatgctcaaggactgtcatgattaactgacaattacataagttactaatcgttaacggacactcttctggacccagtttctaattatcaaccagtgctacaccttagctcccagttagttcttggcaaggcaggctggcagggtatgagcagcatctgaaaactcctgttgaccgagccaataagctagaatccataattccctaactcaatacatgatccagccctgctcttgccagaacaaaatatggttacgtacttcctctattacttagtgccaagcatgtattatttttttccgctaatttttccctttaaagattgtcttttgtttgtgagatatgtattttgttctcttccctctccaggacccaggtgcttgacttcaaatctttcactccctccgttttatattataagtcattttgacttttttcttagtcaaatttctttaagtttgacaacgtttatagaaaaatttagcaacatttacaatacaaaattagttttgtcaaaactaacttttaagatattttagtaatatgtttattttgtgttgggaatgttgctatatttttctataaacttgattaaactttaaaaaagtttgactaggaaaacggtcaaaacgacataatatgaaacagggggagttaaatttatcattgctcattgtgtagacaaccagtcttgtgtttgttaaatgcggtgacagtcctagttaccaacaatccaacatttgactcctagtccttcatagaacacataaaaatggagtacacaccagaatggttgaccattggggtaattgtaacacattgtgcctcttttttgcttttcagagcatcaagaagtcccagtgcccccaggagttggagccagctgatagaagaacacctgttcatgtgaatgttatcaaacgactggaagactatcaggtaagcctttcattcctgtatggctgtaacttgactgtagttttcagtccgatatattaacctttgcatatcgctttattcacaggctcctctaaggcctccatcacccttccagggtgttggaagaacccttggtggtggatcttctgcagaagagagccaggcaccagctcctgccactcaagaaccccgcaggtccgttggaatagttgtggacgactcgctcccatttacatccatacagctaaggctggccgatggcactcgcatggttgcccgtttcaacatgcaccacacggtgggcgacatcaggtctttcatcgacgcctctcggcctggggctacaaggccctatcagctgcagactggtttcccgccgaagcagctggctgatccagcacagaccgtcgagcaagctggtctggcgaactctgtcatcattcagaagatg

SEQ ID NO: 4373 - DNA, 1896 bp, Sorghum bicolor
atggggatggacggcggcggcggcaagctgccgtacagctacgcggcgcaccaggacggcggcaagctggtgaagagcttcagccgcgtggagccgcgcaagttcgggctcggcctcgtcgccggcttcctcctcgtcacctgcgcctacttctccaccgccaagttcgacgccatccacatcgccatgagtaagccccgcctccacaccgttccctcgtctgtctccgccgtcccgctgggatcggctcgctggtgggcgccgccgccgacacctccaactccaactccaagcagcaatttgatcagtaacaagatttgggcaagcgagacccgtccatgtccgaggaggggagcaaggccgaggtgctcgagaaagacgacggcaaggcttccccttcgggttccgggccaggatgacgccgcccccgctgctgccggtcttcttcctcccgtgtcgtcagaggaagccgcgaacggcacgcaagaatcaggtggtcttgaggacgaggagctgcaggtgcaggatgctgttgccaatccttccaagaggagcaacgactccgccgccgccgccgccatcaccaccccaagcagcagcaatggcagctcgctcgctgtggttcactctgaccctgccatcctccctgctcccgcgcagccgattccagaggttaagcaagcagtcttggattcggagacgacgccggcgcgggagtggaagccgctgtgcgacctcacctcgaaccgccgcatcgactggtgcgagctcgacggcgacgtgcgcgtgctgggcgccaacgccagcgtcacgctggtggcgccgccgggcgcggacgaccgcaccttccgcgcggagtcgtggcgcatcaagccgtacccacgcaaggcggacccgaacgcgatgcacgtcgtccgcgtggtgaccgtgcagtcggtgtccggcggcggggcgccggcgtgcacggacaggtacgacgtgccggcgctggtgttctcggaccgcgggtacacgggcaactacttccacgcgttcacggacgtgatcctgccgctgttcctgacggcgcggcagtacgccggcgaggtgcggctgctggtgacggacctccaggcgtggtgggtgggcaagttctcgccggtgttcaaggccatctccaactacgagctggtggacctggacaaggacccgcgcgtgcagtgcttccgccacgtccaggtcgggctcaccagccacgacgacttcagcatcgacccgcgccgcgcgcccaacggctactccatggtcgacttcaccgcgttcatgcgcgccacctacggtctcccgcgcggcgtcgcggccgccgacgcgacgaagcggccgaggctgctgctgatcgcgcgcgcgcggacgcggcggtttgtgaacacggaggagatcgtgcgcggcgccgagaggctcgggttcgaggtggtggtgtcggaaggcacgcacgaggtggcgccattcgcggagctcgccaacagctgcgacgccatcatgggcgtgcacggcgccgggctgaccaacatggtgttcgtgccgacgggcggggtggtgatccaggtggtgccgctgggcgggctggagttcgtggcgggctacttccggggaccttccagggacatggggctgcgctacctcgagtaccggatcacgccggaggagagcacgctgatcgaccagtacccgcgcgaccaccccatcttcacggaccccaacgggatcaagagcaagggatgggagtctctcaaggacgcatacctcgacaagcaggacgtgcggctggacatgaagaggttccggccgacgctcaagaaggccatcgcgcacctcaggaaggccaaggccaaggcgaccaacggcggcggcaactaa

SEQ ID NO: 4374 - DNA, 2297 bp, Zea mays
ggcgcttcgcaggtgccgtggcttgccgcttccttcgccgtgctcactagtcaccagagagggaggaggctctggcgctctgcttctgctgccgcttcttcttcttctcctgctgctgctcttacggagataagcagggggggccgggccggggcagggggaggtgacagctgagctgactagctgagtgaagcatggggatggacgccggcggcggcaagctgccgtacagctacgccggccagcaggacggagggaagctggtgaagagcgtcagccgcgtggagccgcgcaggttcggcctgggcctcgtggcgggcttcctcctcgtcacctgcgcctacttctccaccgccaagttcgacgccatccagatcgccatgaccagccgacccgtctccagcaatgcgggcggcgtcggggtcggctcgctggaggtgggcggcgtcgtcgccgccgccgacacctacaacgcctccaggcagggattagatttgggcaagaaaggcccgggcgcgacgtccatggccgacgagggaagcgaggccgaggcgctcgagaaagacggcggcaaggcttcttcaccttcggggccaggcgttcctgccgctctccttcctcccgtgtcgtcagaggaagccgcgaacagcacgctggaatcaggcggtcttgaggacgaggagctacaggtgcaggatgcagttgccagtggttccaagaggagcaaagactctgccgccgccgccgccgccacacgcagcgccaatgtcagctcaccctctgtggttcactctcaccatgccatcctccctgctcccgcgcagcggattccagaggttaagcaagcagactcggagacgacgccggcgcgggagcgggagtggaagccgctgtgcgacgtcacctcgaaccggcgcatcgactggtgcgagctggacggcgacgtccgcgtggtcggcgccaacgccagcgtgacgctggtggcgccgccgggcgcggacaaccggaccttccgcgcggagtcgtggcgcatcaagccgtacccgcgcaaggcggacccgaacgcgatgcgcttcgtgcgcgtgctgacggtgcggtcggtggcgtcgggctccggcgaggcggcgtgcacggacggcggcgacgacgacgtgccggcgctggtgttctcggaccgcgggtacacgggcaactacttccacgcgttcacggacgtgatcctgccgctgttcctgacggcgcggcggtacgcgggcgaggtgcggctgctggtggccgacctccagccgtggtgggtgggcaagttcctgcccgtgttcaggagcatctccaagtacgagctggtggacctggaccgcgacccgcgcgtgcgctgcttccgccacgtccaggtggggctcaccagccacgccgacttcagcatcgacccgcgccgcgcgcccaacggctactccatgctggacttcacccggttcatgcgcgccgcctacgggctcccgcgcggcgacgtcgtcgcggcggcgccggcgaggcggccgaggctgctggtggtggcgcgcgcgcggacgcggcggttcgtcaacacggaggagatcgtgcgcggcgccgaggccgtcgggttcgaggcggtggtgtcggaagggacgcacgaggtggcgcccttcgcggagctggccaacggctgcgacgccatcatgggcgtgcacggcgccgggctgaccaacatggtgttcctgcccacgggcggggtggtgatccaggtggtgccgctgggagggctggagttcgtggccggatacttccgaggcccgtccgtggacatggggctgcgctacctcgagtaccggatcgagccggaggagagcacgctggtggaccagtacccgcgcgaccaccccatcttcacggaccccaacgggatcaagagcaagggctgggagtccctcaaggacgcctacctcgacaagcaggacgtgaggctggacatggagaggttccggccgacgctccaggaggccatcgcgcacctcaggaaggccaaggccaaggccaatggcgacggaaacaactaggcatcgccgtgcgtatgtagcgtgttcattcgtcctcttattaatctactcttctttttcttctttccttttcgggttatgtcggtgtatgtagcgtgcagaaatcgagcaaatgtatgatatgtggcagggaaagaagctagagcgaataatatattctctctcttgtcatccagttttcgattgaatggcgtatgccaagtgatcaggtgaaggtcgacccgg

SEQ ID NO: 4375 - DNA, 2268 bp, Zea mays
ctgccgtattcacttttcactcgttcgtccatccttccacgccccccacagaaccgtctccccagcggagcccggcgcctcacggtcgcaatttattgcttgcgcaccgcctcgccgctttggcgtggggcgtttgcctgtgtggcgcttcgcaggtgccgtggcttgccgcttccttcgccgtgctcactagtcaccagagagggaggaggctctggcgctctgcttctgctgccgcttcttcttcttctcctgctgctgctcttacggagataagcagggggggccgggccggggcagggggaggtgacagctgagctgactagctgagtgaagcatggggatggacgccggcggcggcaagctgccgtacagctacgccggccagcaggacggagggaagctggtgaagagcgtcagccgcgtggagccgcgcaggttcggcctgggcctcgtggcgggcttcctcctcgtcacctgcgcctacttctccaccgccaagttcgacgccatccagatcgccatgaccagccgacccgtctccagcaatgcgggcggcgtcggggtcggctcgctggaggtgggcggcgtcgtcgccgccgccgacacctacaacgcctccaggcagggattagatttgggcaagaaaggcccgggcgcgacgtccatggccgacgagggaagcgaggccgaggcgctcgagaaagacggcggcaaggcttcttcaccttcggggccaggcgttcctgccgctctccttcctcccgtgtcgtcagaggaagccgcgaacagcacgctggaatcaggcggtcttgaggacgaggagctacaggtgcaggatgcagttgccagtggttccaagaggagcaaagactctgccgccgccgccgccgccacacgcagcgccaatgtcagctcaccctctgtggttcactctcaccatgccatcctccctgctcccgcgcagcggattccagaggttaagcaagcagactcggagacgacgccggcgcgggagcgggagtggaagccgctgtgcgacgtcacctcgaaccggcgcatcgactggtgcgagctggacggcgacgtccgcgtggtcggcgccaacgccagcgtgacgctggtggcgccgccgggcgcggacaaccggaccttccgcgcggagtcgtggcgcatcaagccgtacccgcgcaaggcggaccgcgggtacacgggcaactacttccacgcgttcacggacgtgatcctgccgctgttcctgacggcgcggcggtacgcgggcgaggtgcggctgctggtggccgacctccagccgtggtgggtgggcaagttcctgcccgtgttcaggagcatctccaagtacgagctggtggacctggaccgcgacccgcgcgtgcgctgcttccgccacgtccaggtggggctcaccagccacgccgacttcagcatcgacccgcgccgcgcgcccaacggctactccatgctggacttcacccggttcatgcgcgccgcctacgggctcccgcgcggcgacgtcgtcgcggcggcgccggcgaggcggccgaggctgctggtggtggcgcgcgcgcggacgcggcggttcgtcaacacggaggagatcgtgcgcggcgccgaggccgtcgggttcgaggcggtggtgtcggaagggacgcacgaggtggcgcccttcgcggagctggccaacggctgcgacgccatcatgggcgtgcacggcgccgggctgaccaacatggtgttcctgcccacgggcggggtggtgatccaggtggtgccgctgggagggctggagttcgtggccggatacttccgaggcccgtccgtggacatggggctgcgctacctcgagtaccggatcgagccggaggagagcacgctggtggaccagtacccgcgcgaccaccccatcttcacggaccccaacgggatcaagagcaagggctgggagtccctcaaggacgcctacctcgacaagcaggacgtgaggctggacatggagaggttccggccgacgctccaggaggccatcgcgcacctcaggaaggccaaggccaaggccaatggcgacggaaacaactaggcatcgccgtgcgtatgtagcgtgttcattcgtcctcttattaatctactcttctttttcttctttccttttcgggttatgtcggtgtatgtagcgtgcagaaatcgagcaaatgtatgatatgtggcagggaaagaagctagagcgaataatatattctctctcttgtc

SEQ ID NO: 4376 - DNA, 2283 bp, Zea mays
ccagcagctcacgagagagcgcaagcaagtattactgcgcaccgcctcgcccgcgggcgtcagcgtgaagctgccgcacagctaccccgcgaggcatggggatggacgccggcggcgggaagctgccgtacagctaccccgcccaccaggacggcaagctggtgaagagcttcagccgcgtggagccccgcaagttcggcctcgccctcgtcgcgggcttcctgctcgtcacctgcgcctacttctccaccgccaagttcgacgccatccacgtcgccatgatcagccccgtctccggcaatgcggctgggatcggcccgctagtgggcgccgccaacgccgacacctccgactccaagcagcgattagatttgggcaagcaagacccggacgacgcgctgtccaggtccgaggaggaggaggggagcagggccgacgaggtgctggagaaggacgacggcaaggcatcctcgtcgtcggggacagattccggcagcaatgcgccgctggaggacacgaggagagacgagacctttgtgggggacagcggtggtgcatcttccgcggcgggcgccaggagtgaggcggttcctgccaggcacgagcacgacgatgacgcccccgctgccgccctgcttcctcccgtgacgtcagagggagccgcgaacagcacgcaaggatcaggagttcttgaggacgaggagctgcaggtgcaggacgctgtcgccaatccttccaagaggagcaacgattcagccgccacgcgcagcagcagcagtggccgctcgccctctgtggttcactctgatcctgccatcctccctgctccctcgcagcagattgctcctgctgctcctcaagaggcagataaggctcttgctgttcagcatattccagcgatacctgaggttaagcaatcagattcggagacgccggcgcgggagtggaagccgctgtgcgacatcacctcgaaccgccgcatcgactggtgcgagctcgacggcgacgtccgcgtgctgggcgccaacgcgagcgtcacgctggtggcgccgcccggcggggcggacggccgcaccttccgcgcggagtcgtggcgcatcaagccgtacccgcgcaaggcggacccgaacgcgatgcgcgtcgtccgcgtgctgacggtgcggtcggtgcccggcgaggcgcccgcgtgcacggaccggcacggcgtcccggcgctggtgttctcggaccgcgggtacacggggaactacttccacgcgttcacggacgtgatcctgccgctgttcctgacggcgcggcagtacgccggcgaggtgcggctgctggtgacggacctccaggcgtggtgggtgggcaagttcgcgccggtgttcaggagcatctccaactacgagctggtggacctggaccgcgacccgcgcgtgcactgcttccgccacgtccaggtggggctcaccagccacgacgacttcagcatcgacccgcgccgcgcccccaacggctactccatgctggacttcaccgggttcatgcgcgccgcctacgggctcccgcgcggcgacgtcgccgccgccgctggcccgtcgtcgaagcggcggccgaggctgctgctgatcgcgcgcgcgcggacgcggcggttcgtgaacgcggaggagatcgtgcgcggcgcggagaagctcgggttcgaggtggtggtgtcggaggggacgcacgaggtggcgcccttcgcggagctggccaacagctgcgacgccatcatgggcgtgcacggcgccgggctgaccaacatggtgttcgtgccgacgggcggggtggtcatccaggtggtgccgctgggcgggctggagttcgtggcgggctacttccggggtccgtccagggacatggggctgcgctacctcgagtaccggatcacgccggaggagagcaccctgatcaaccagtacccgcgcgaccaccccatcttcacggaccccaacgggatcaagagcaagggctgggagtccctcaaggatgcctacctcgacaagcaggacgtgtcgttggacatgaagaggttccggcccacgctcaagaaggccatcgcgcacatcaggaaggccagggccaaggccaacgccggcggcggcggcaacaactaggcatcgccgtacatgtgctcattcatcctcctcttactctacttttgtttttcctcccctccttttcggattatggcagtacttgtatgtagcaagcagaaatcgatcaaatgtataatatggcagggaaagaagttagagc

SEQ ID NO: 4377 - DNA, 2408 bp, Zea mays
ccacgccctgcccgccggggctgcttgccactcctctctcttcctcatccatcctcgccccggccccgcccccagaaccaaaccagcctccctccccagcagctcacgagagagcgcaagcaagtattactgcgcaccgcctcgcccgcgggcgtcagcgtgaagctgccgcacagctaccccgcgaggcatggggatggacgccggcggcgggaagctgccgtacagctaccccgcccaccaggacggcaagctggtgaagagcttcagccgcgtggagccccgcaagttcggcctcgccctcgtcgcgggcttcctgctcgtcacctgcgcctacttctccaccgccaagttcgacgccatccacgtcgccatgacagtcagccccgtctccggcaatgcggctgggatcggcccgctagtgggcgccgccaacgccgacacctccgactccaagcagcgattagatttgggcaagcaagacccggacgacgcgctgtccaggtccgaggaggaggaggggagcagggccgacgaggtgctggagaaggacgacggcaaggcatcctcgtcgtcggggacagattccggcagcaatgcgccgctggaggacacgaggagagacgagacctttgtgggggacagcggtggtgcatcttccgcggcgggcgccaggagtgaggcggttcctgccaggcacgagcacgacgatgacgcccccgctgccgccctgcttcctcccgtgacgtcagagggagccgcgaacagcacgcaaggatcaggagttcttgaggacgaggagctgcaggtgcaggacgctgtcgccaatccttccaagaggagcaacgattcagccgccacgcgcagcagcagcagtggccgctcgccctctgtggttcactctgatcctgccatcctccctgctccctcgcagcagattgctcctgctgctcctcaagaggcagataaggctcttgctgttcagcatattccagcgatacctgaggttaagcaatcagattcggagacgccggcgcgggagtggaagccgctgtgcgacatcacctcgaaccgccgcatcgactggtgcgagctcgacggcgacgtccgcgtgctgggcgccaacgcgagcgtcacgctggtggcgccgcccggcggggcggacggccgcaccttccgcgcggagtcgtggcgcatcaagccgtacccgcgcaaggcggacccgaacgcgatgcgcgtcgtccgcgtgctgacggtgcggtcggtgcccggcgaggcgcccgcgtgcacggaccggcacggcgtcccggcgctggtgttctcggaccgcgggtacacggggaactacttccacgcgttcacggacgtgatcctgccgctgttcctgacggcgcggcagtacgccggcgaggtgcggctgctggtgacggacctccaggcgtggtgggtgggcaagttcgcgccggtgttcaggagcatctccaactacgagctggtggacctggaccgcgacccgcgcgtgcactgcttccgccacgtccaggtggggctcaccagccacgacgacttcagcatcgacccgcgccgcgcccccaacggctactccatgctggacttcaccgggttcatgcgcgccgcctacgggctcccgcgcggcgacgtcgccgccgccgctggcccgtcgtcgaagcggcggccgaggctgctgctgatcgcgcgcgcgcggacgcggcggttcgtgaacgcggaggagatcgtgcgcggcgcggagaagctcgggttcgaggtggtggtgtcggaggggacgcacgaggtggcgcccttcgcggagctggccaacagctgcgacgccatcatgggcgtgcacggcgccgggctgaccaacatggtgttcgtgccgacgggcggggtggtcatccaggtggtgccgctgggcgggctggagttcgtggcgggctacttccggggtccgtccagggacatggggctgcgctacctcgagtaccggatcacgccggaggagagcaccctgatcaaccagtacccgcgcgaccaccccatcttcacggaccccaacgggatcaagagcaagggctgggagtccctcaaggatgcctacctcgacaagcaggacgtgtcgttggacatgaagaggttccggcccacgctcaagaaggccatcgcgcacatcaggaaggccagggccaaggccaacgccggcggcggcggcaacaactaggcatcgccgtacatgtgctcattcatcctcctcttactctacttttgtttttcctcccctccttttcggattatggcagtacttgtatgtagcaagcagaaatcgatcaaatgtataatatggcagggaaagaagttagagcaaatcatatattctcttttccccccac

SEQ ID NO: 4378 - DNA, 2387 bp, Zea mays
agaaccaaaccagcctccctccccagcagctcacgagagagcgcaagcaagtattactgcgcaccgcctcgcccgcgggcgtcagcgtgaagctgccgcacagctaccccgcgaggcatggggatggacgccggcggcgggaagctgccgtacagctaccccgcccaccaggacggcaagctggtgaagagcttcagccgcgtggagccccgcaagttcggcctcggcctcgtcgcgggcttcctgctcgtcacctgcgcctacttctccaccgccaagttcgacgccatccacgtcgccatgacagtcagccccgtctccggcaatgcggctgggatcggcccgctagtgggcgccgccaacgccgacacctccgactccaagcagcgattagatttgggcaagcaagacccggacgacgcgctgtccaggtccgaggaggaggaggggagcagggccgacgaggtgctggagaaggacgacggcaaggcatcctcgtcgtcggggacagattccggcagcaatgcgccgctggaggacacgaggagagacgagacctttgtgggggacagcggtggtgcatcttccgcggcgggcgccaggagtgaggcggttcctgccaggcacgagcacgacgatgacgcccccgctgccgccctgcttcctcccgtgacgtcagagggagccgcgaacagcacgcaaggatcaggagttcttgaggacgaggagctgcaggtgcaggacgctgtcgccaatccttccaagaggagcaacgattcagccgccacgcgcagcagcagcagtggccgctcgccctctgtggttcactctgatcctgccatcctccctgctccctcgcagcagattgctcctgctgctcctcaagaggcagataaggctcttgctgttcagcatattccagcgatacctgaggttaagcaatcagattcggagacgccggcgcgggagtggaagccgctgtgcgacatcacctcgaaccgccgcatcgactggtgcgagctcgacggcgacgtccgcgtgctgggcgccaacgcgagcgtcacgctggtggcgccgcccggcggggcggacggccgcaccttccgcgcggagtcgtggcgcatcaagccgtacccgcgcaaggcggacccgaacgcgatgcgcgtcgtccgcgtgctgacggtgcggtcggtgcccggcgaggcgcccgcgtgcacggaccggcacggcgtcccggcgctggtgttctcggaccgcgggtacacggggaactacttccacgcgttcacggacgtgatcctgccgctgttcctgacggcgcggcagtacgccggcgaggtgcggctgctggtgacggacctccaggcgtggtgggtgggcaagttcgcgccggtgttcaggagcatctccaactacgagctggtggacctggaccgcgacccgcgcgtgcactgcttccgccacgtccaggtggggctcaccagccacgacgacttcagcatcgacccactccgcgcccccaacggctactccatgctggacttcaccgggttcatgcgcgccgcctacgggctcccgcgcggcgacgtcgccgccgctggcccgtcgtcgaagcggcggccgaggctgctggtgatcgcgcgcgcgcggacgcggcggttcgtgaacgcggaggagatcgtgcgcggcgccgtgaagctcgggttcgaggtggtggtgtcggaggggacgcacgaggtggcgcccttcgctgagctggccaacagctgcgacgccatcatgggcgtgcacggcgccgggctgaccaacatggtgttcgtgccgacgggcggggtggtcatccaggtggtgccgctgggcgggctggagttcgtggcgggctacttccggggcccgtccagggacatggggctgcgctacctcgagtaccggatcacgccggaggagagcacgctgatcaaccagtacccgcgcgaccaccccatcttcacggaccccaatgggatcaagagcaagggctgggagtccctcaaggatgcctacctcgacaagcaggacgtgtcgctggacatgaagaggttccgccccacgctcaagaaggccatcgcgcacatcaggaaggccagggccaaggccaacgccggcggcggcggcaacaactaggcatcgccgtacatgtgctcattcatcctcctcttactctacttttgtttttcctcccctccttctcgggttatggcagtacttgtatgtagcaagcaaaatcgatcaaaatgtataatatggcagggaaagaagttagagcaaatcatatattctctttttacccccgcttttcggtgagggtcaatggtggatggagagtatgatcaaaaaaaaaaaaaaaa

SEQ ID NO: 4379 - DNA, 1654 bp, Sorghum bicolor; identical to SEQ ID NO: 1104

SEQ ID NO: 4380 - DNA, 1510 bp, Zea mays
ggctgcgcccggggcccccggatcacggaatcctacccttaccaaccctagcctccattggtcgccgtctcgggccatggcagggccggcgccggatcgggccgccctgactgtgggtccgggcatggacatgccgatcatgcacgacagcgaccggtacgagctcgtgcgcgacatcggctccggcaacttcggcgttgcccgcctcatgcgcgaccgccgcaccaccgaactcgtcgccgtcaagtacatcgagcgtggcgagaagatagatgagaatgtccagcgcgaaataattaaccatagatcattgaaacaccctaacattattaggtttaaagaggttattttaacaccgacccatcttgctattgtcatggaatatgcctctggcggtgagctttttgagagaatatgtaagaacgtgcgattcagtgaagatgaggctcgctacttcttccaacaactcatttcaggagtaagctactgccattcaatgcaagtatgccaccgtgatttgaagctggagaacacacttctagatgggagtgatgctcctcgcttgaagatatgtgacttcggttattccaagtcatctgttcttcattcccaaccgaagtcaactgttggaacacctgcttatattgcacctgaagttctgttgaaaaaagaatatgatggcaagattgctgatgtttggtcatgtggtgtaaccctctatgtaatggctgttggtgcatatccttttgaagacccagaagagcctaagaacttccgcaagacaattcagcgcatcttgaacgttcagtacgccattccagactacgtgaacatatctccagagtgcaggcatctaatttcgaggatttttgttggtgatcctgctatgcgaataacaatcactgaaatccggaatcatagttggttcctgaagaaccttcctgctgatcttatggatgatgatagcatgagcaaccaatatgaggagcctgatcagccaatgcagaccatggatcagatcatgcagattttaacagaggccaccataccacctgcctgttctcgcagtataaatgttctagctgatggactggacatggacgacgacatggatgatcttgactccgattcggatcttgatgttgacagcagcggtgagattgtatacgcaatgtgagtaacatctcagtaaccatctcagtatctcaccagtcaaccaaagaaccaatcaggcatgggacaccctgatgttgtacactctgccaaagacctagcatccttttgtaaaatatctccctgtagttttctcaaagaagcgcaagcccaacctgttctggggaacacggatgctgtagtcaaactggggttattcagattgtaaaactggcctcttgcttcctgcttactctcaggcttcgacttgtgtgttgctgttgaatatgtacttacaagaaacttctacggagtactcatgttgatctgttcgaagctaacatcggaaagagcattt

SEQ ID NO: 4381 - DNA, 1640 bp, Zea mays
acggacagtattcaggagaactcacgtttctcttggtcagccagtgacatcaccaacttgttgacggtagggagagcaagttcttcggcgatttgagaagaaacgaggagcgagagagcgtgggtgcgtggggggtgggggctgcgcccggggcccccggatcacggaatcctacccttaccaaccctagcctccattggtcgccgtctcgggccatggcagggccggcgccggatcgggccgccctgactgtgggtccgggcatggacatgccgatcatgcacgacagcgaccggtacgagctcgtgcgcgacatcggctccggcaacttcggcgttgcccgcctcatgcgcgaccgccgcaccaccgaactcgtcgccgtcaagtacatcgagcgtggcgagaagatagatgagaatgtccagcgcgaaataattaaccatagatcattgaaacaccctaacattattaggtttaaagaggttattttaacaccgacccatcttgctattgtcatggaatatgcctctggcggtgagctttttgagagaatatgtaagaacgtgcgattcagtgaagatgaggctcgctacttcttccaacaactcatttcaggagtaagctactgccattcaatgcaagtatgccaccgtgatttgaagctggagaacacacttctagatgggagtgatgctcctcgcttgaagatatgtgacttcggttattccaagtcatctgttcttcattcccaaccgaagtcaactgttggaacacctgcttatattgcacctgaagttctgttgaaaaaagaatatgatggcaagattgctgatgtttggtcatgtggtgtaaccctctatgtaatggctgttggtgcatatccttttgaagacccagaagagcctaagaacttccgcaagacaattcagcgcatcttgaacgttcagtacgccattccagactacgtgaacatatctccagagtgcaggcatctaatttcgaggatttttgttggtgatcctgctatgcgaataacaatcactgaaatccggaatcatagttggttcctgaagaaccttcctgctgatcttatggatgatgatagcatgagcaaccaatatgaggagcctgatcagccaatgcagaccatggatcagatcatgcagattttaacagaggccaccataccacctgcctgttctcgcagtataaatgttctagctgatggactggacatggacgacgacatggatgatcttgactccgattcggatcttgatgttgacagcagcggtgacattgtatacgcaatgtgagtaacatctcagtaaccatctcagtatctcaccagtcaaccaaagaaccaatcaggcatgggacaccctgatgttgtacactctgccaaagacctagcatccttttgtaaaatatctccctgtagttttctcaaagaagcgcaagcccaacctgttctggggaacacggatgctgtagtcaaactggggttattcagattgtaaaactggcctcttgcttcctgcttactctcaggcttcgacttgtgtgttgctgttgaatatgtacttacaagaaacttctacggagtactcatgttgatctgttcaaaaaaaaaaaaaaaa

SEQ ID NO: 4382 - DNA, 1567 bp, Zea mays
catcagacatcaccaactcgtcgacggtagagagagcaagctcttcggcgatttgagaagaatcgaggagcgagcgagcgagcgagcgagagaggaggaggaggagctggggcttgagcctgcgcccgggggccccgggtcacggaatcctaccattaccaaccctagccttcgttgatcgccgtctcaggtcatggcagggccggcgccggatcgggccgccctgactgtggggccgggcatggacatgccaatcatgcacgacagcgaccggtacgagctcgtgcgcgacatcggctccggcaacttcggcgttgcccgcctcatgcgcgaccgccgcaccagcgaactcgtcgccgtcaagtacatcgagcgcggcgagaagatagatgagaatgtccagcgtgagataattaaccatagatcattgaagcaccctaacattattaggtttaaagaggttattttaacaccgacccatcttgctattgtcatggaatatgcctctggcggtgagctttttgagaggatatgtaagaacgtgcgattcagtgaagatgaggctcgctacttcttccagcagcttatttcaggacaagtatgccaccgtgatttgaagttggagaacacacttctagatgggagtgacgctcctcgcttgaagatttgcgatttcggttattccaagtcatctgttcttcattcccagccgaagtccactgttggaacacctgcttatattgcacctgaagttttgttgaaaaaagaatatgatggcaagattgctgacgtttggtcatgtggtgtaaccctctatgtaatggttgttggcgcatatccttttgaagatccagaagagcctaagaacttccgcaagacaattcagcgtatcttgaatgttcagtacgcaattccagacaacgtgaacatatctccagagtgcaggcatctaatttcgaggatttttgttggcgatcctgctacgcgaataacaatccctgaaatccggaatcatagttggttcctgaagaaccttcctgctgatctgatggatgatgatagcatgagcaaccaatatgaggagcctgaccagccaatgcagaccatggatcagatcatgcagattttaacagaggccaccataccacctgcctgttctcgcagtataaatgtcctagctgatggactggacatggatgacgacatggatgatcttgattccgactcagatcttgatgttgacagcagcggtgagattgtgtacgcaatgtgagtaacatctcagcagccatctcagcagtcaaccaaggaaccaatcaggcatgggatgccctgttgtatactctggcaaagggcatgcttccttttgtgaaaaacatccatgtagttttctcaaggaatcgcaatgtgttctgtggaacacatatgttgtagtcaaactcgggttactcagcttgtaaaactagcctcctcttgcttcctggttactgggctttggatactctcaggcttcgacttgtgtgttgctgttaaatatgtataagaaacttctactcaggttgatctg

SEQ ID NO: 4383 - DNA, 1591 bp, Hordeum vulgare subsp. vulgare
ggttttatctctctctctctcttggtcggccagtgtcacgaactcgtcgcggcggagggggggagaggggggctgagctcgccgtcgattcgagggggcgggaggagaggggcggccaccccggcggaccgaacccttgcggccgcggcctcctccattcgaccgccgccgtcgccgccggccatggctggggcggcgccggatcgggcggcgctgacggtcggcccgggcatggacatgccgatcatgcacgacagcgaccgctacgagctggtgcgggacatcggctccggcaacttcggcgtcgcccgcctcatgcgcgaccgccgcaccatggagctcgtcgccgtcaagtacatcgagcgcggggagaagatagacgagaatgtccagcgtgagataattaaccatagatcactgaaacatcccaacatcattaggtttaaggaggttattttaacaccgactcatcttgctattgtcatggaatatgcatctggtggtgagctttttgagaggatatgtaaaaatatacgattcagtgaagacgaggctcgctacttcttccagcagcttatatctggagtcagctactgccattcaatgcaagtatgtcaccgtgacttgaagctggagaacacattgctagacggtagtcctgctcctcgcttgaagatatgtgatttcggctattctaagtcttcagttctccattcacaaccaaaatcaactgtaggaacacccgcttatattgcacctgaagttctgttgaagaaagaatatgatggcaagattgctgatgtatggtcctgtggtgtgactctttatgtcatggtagtcggtgcgtatccttttgaggatccagaagagcctaagaacttccggaagacaattcagcgtatcttgagtgttcagtattcaattccagataacgtggacatatctccagagtgcaggcacctaatttcgaggatttttgttggggatcctgctttgaggataaccatccctgaaatacggagccataattggttcttaaagaacctccccgccgatctgatggacgatgatagtatgagcagccagtacgaggagcccgaacagccaatgcagacgatggaccagatcatgcaaattctgacggaggccaccataccacccgcttgttctcgtataaaccacatcctaactgatgggttcgacatggacgatgacatggatgaccttgaatcggactcagatctcgatatcgacagcagtggagagatcgtgtatgcgatgtgagccatctacagcggctatcgcgtcgaagcgaccgtagaaagcagctgaaaggtgacctgatgctgtaccctgtcaaaagagctagcagcacttcgttctgtgtttcgcaagcgaagtcccccgtcctgttctggttgtaatataatgggggttagtccctggagaagcatcttttctgttcctgttgtgctacatatgtacaagtagctcgtactcctgttaatgtctgaacctgtgactcaacttcgttttattttatttgtgttactgtatatctagtgacctgttgtttgggctactttgccag

SEQ ID NO: 4384 - DNA, 1412 bp, Oryza sativa Japonica Group
cctcgggtggccgaggccttggaagccgcaggtaggtagaacccccttgccgtcgccggccatggcagcggcgggggccggggcgggggcgccggatcgggcggcgctgacggtgggcccggggatggacatgccgatcatgcacgacagcgaccggtacgagctcgtgcgcgacatcggctccggcaacttcggcgtcgcccgcctcatgcgcgaccgccgcaccatggagctcgtcgccgtcaagtacatcgagcgcggcgagaagatagatgataatgtccagcgtgagattataaatcaccgatcgttgaaacatcctaacattattaggtttaaggaggttattttaaccccaactcatcttgctattgtcatggaatatgcctctggtggtgagcttttcgagagaatttgtaagaatgtacggttcagtgaagatgaggctcgctacttcttccagcagcttatctcgggagtcagctactgccattcaatgcaagtatgccaccgtgatttgaagttggagaatacactgctggatggaagccctgctccacgcttgaaaatatgtgactttggctattctaagtcttcagttctccattcacaaccaaaatccactgtaggaacccctgcttatattgcacctgaagttctgttgaagaaagaatacgatggcaagactgctgatgtatggtcctgtggtgtgactctatatgttatggtagttggtgcatatcctttcgaggatccagaagagcctaagaacttccgtaaaacaattcagcgtatcttgaatgttcagtactcaattccagaaaacgtggacatatctccagaatgtaggcatctaatttcgaggatttttgtcggggatccgtctttgaggataacaatcccagaaatacggagccatggctggttcttgaagaaccttcctgcagatttgatggacgatgatagtatgagcagccagtatgaggaacctgatcagccaatgcaaaccatggatcagatcatgcaaattttaactgaggccaccataccacctgcttgctctcgaataaaccacatcctaactgatggactcgacctagacgatgacatggatgacctcgattccgactcagatattgatgttgatagcagcggcgagatcgtctatgcgatgtaagtcatcgaccaacaagagaactgaaggggcagggtgccctgatgtgtaccttgtcaaagtactagcagccctttgtgaaaagaatcgttctgtattttgcttagtttcttgccgtggaaccccagcgatgttcccatgaactcatgatgctgttgtaattgaactggggttacttccctggaataacagctttcctcctccccccattgctgaggcctggttacctttaagcttc

SEQ ID NO: 4385 - DNA, 1739 bp, Vitis vinifera
gagaaagaagagagagaaggagcagaaaaaaaaagcagagccttttcacgagctccctcaccgcctctgcaaccacaaaaaaaataaaataaaaccctagaaatccaaatctgctgaacacctctctctctctttctctctgtgtgaggtgggtgaagtcttcacgggctcggccacatcttcggtccctatctccacccaatcgcaaccaatcgactggtccccgttccgccacgtcgcgtaacttcctgcttcgatctggtttacggtttgtataatatgagcagggcctcgtcggagtagggttcgggagagtgcgggtttgtcggagatggatcggtcggcgatcacggtggggccggcgatggacgtgccgatcatgcacgacagtgatcggtacgagctcgtgcgggacatcgggtcggggaattttggagtggccaggctgatgagggataagcagactggtgagctagttgcggtaaagtatatcgaaagaggtgagaagatagatgaaaatgtacaaagggaaatcattaaccacagatcactgaggcatcccaacatcgtcagattcaaagaggttatattgacaccaacccaccttgctattgtgatggaatatgcctctggaggagagctctttgagcggatatgcaatgccggccggttcagtgaggatgaggcacgtttcttcttccaacaacttgtatcaggagtcagctactgtcatgcgatgcaagtatgccaccgtgacttgaaattggagaacacactgttagatggaagcccagctcctcgtttgaagatttgtgactttgggtactccaagtcctcagtgctgcattcacaaccaaaatcgactgttggaacccctgcatacattgctcctgaagtcttacttaagaaagaatatgacgggaagattgcagatgtatggtcttgtggggtaaccttatatgtaatgctggtgggtgcttacccatttgaggaccctgaggaacctaagaacttccacaagacaatacagagaattttgaaagtccagtattctattccagattatgttcatatatctcctgagtgccgtcatctgatctcaaggatttttgtagctgatcctgcaacgaggataacgattgctgagatcaggaaccatgagtggtttctaaagaacctcccagcagatctcatggatgaaactaagatggacaatcaatatgaagaacctgagcagccgatgcagtcaatcgatgaaattatgcggataataggggaagctatgatacctgcagctggaacccagtctctgaaccaatatctgacaggcagcctggacattgatgacgaaatggaggaggatctggagacggatcccgacctcgatattgatagcagtggagaaatagtgtatgcaatgtgaggatgaaagcgtggctgttgggggaagtgaagaagaagaccaacatcttcacagaaagtcagagacttcacttctgggtctggggtaattgtgtgtgaattggaggacaaaaaagggagggcatatgtatgattccaaaatctctctttatctgggtcagtcagaactccaacgttgcccacgaatgcttcttgtcttagtgatgtggtgtttttgtttttgttgttagttgttaccattcctaagtggcaggtgtactcttatgtatgtacaatttgcattatagtactgtaacagtgtacctaatattcctctc

SEQ ID NO: 4386 - DNA, 951 bp, Sorghum bicolor
atggtggttcccgtgatcgacttctccaagctggagctggacggcgccgagagggcggagacactggagcagatcgccaatggctgcgaggcgtggggcttcttccagctcgtgaaccacggcatcccgctggagctcctcgagcgcgtcaagaaagtgtgctccgactgctaccgcctccgtgaggccggcttcaaggcgtcggagccggtgcgcacgctggaggcgctcgtcgccgcagagcaacgcggcgaggaggtggcgcccgtggacgacctggactgggaggacatcttctacatccacgacggctgccagtggccgtccgacccgccggcgttcaaggagaccatgcgcgagtaccgcgccgagctgaggaagctcgccgagcgcgtcatggaggccatggacgagaacctcggcctggaccggggcaccatcaaggccgccttctccggcgacggccggcgcgagcctttcttcggcaccaaggtcagccactacccgccgtgcccgcgcccggacctcatcacgggcctgcgcgcgcacaccgacgccggcggcgtcatcctgctgttccaggacgacagggtcggcggcctcgaggtgctcaaggacggccagtggaccgacgtgcagccgctcgcgggtgccatcgtcgtcaacactggcgaccagatcgaggtgctcagcaacggccggtaccgcagcgcctggcaccgcgtgctgcccatgcgcgacggcaaccgccgctccattgcttccttctacaacccggccaacgaggccaccatttcgccggcggcggtggccaccagcggcggcgcggcgtaccccaagtacatgttcggcgactacatggacgtgtacgtcaagcagaagttccaggccaaggagccaaggttcgaagccgtcaaggcggcggcgccaaagtcatctccggcggcttaa

SEQ ID NO: 4387 - DNA, 1616 bp, Sorghum bicolor
atgcaggacagctccagtccaggtccatacatacctgcactgcaatgcttgtcttgaccgaagcttcctcctcatccatggcagtaggttgagctgcttgctcactatatatacagcaccatccatgccgagctctccatctcaattcatcagctgcaagctagctagccttcactcaagcatcacaaaaccctactactgccaccttcagcacctgcatagatacatatatacaaacacttcacaacaatctatctgctcgatcgtcttcatcaattcccaagccaataatcaacaatggtggttcccgtgatcgacttctccaagctggagctggacggcgccgagagggcggagacactggcgcagatcgccaatggctgcgaggagtggggcttcttccagctcgtgaaccacggcatcccgctggagcttctcgagcgcgtcaagaaggtgtgctccgactgctaccgcctccgtgaggccggcttcaaggcgtcggagccggtgcgcacgctggaggcgctcctcgacgcggagcggcgcggcgaggaggtggcgcccgtggacgacctggactgggaggacatcttctacatccacgacgggagccagtggccgtccgacccgccggcgttcaaggagaccatgcgcgagtaccgcgccgagctgaggaagctcgccgagcgcgtcatggaggccatggacgagaacctcggcctggaccggggcaccatcaaggccgccttctccggcgacggccggcacgagcctttcttcggcaccaaggtcagccactacccgccgtgcccgcgcccggacctcatcactggcctgcgcgcgcacaccgacgccggcggcgtcatcctgctgttccaggacgacaaggtcggcggcctcgaggtgctcaaggacggccagtggaccgacgtgcagccgctcgcgggcgccatcgtcgtcaacaccggcgaccagatcgaggtgctcagcaacggccggtaccgcagcgcctggcaccgcgtgctgcccatgcgcgacggcaaccgccgctccatcgcttccttctacaacccggccagcgaggccaccatctcgccggcggcggtggccaccagcggcggcgaggcgtaccccaagtacatgttcggcgactacatggacgtgtacgtcaagcagaagttccaggccaaggagccaaggttcgaagccgtcaaggcggcggcgccaaagtcatctccagcggcataaataaatgggggtggaaatcgaaaattttaatatattataaataattattaatttatttgttggatataacagctgaataaataataatataagtataataaatacgggttagcacttgtggtgtttcactgtgtttaactttagtggcatggcatgatatattgttgtagcaataagtttgttgagttttaatcctatagatatagaaaagaaaaaggtgtgtctagtctttggtgtatagagtttattgagcacatgcatatccaagtattgggttttttcatgtacttaatgtgatagtggttgtatgtaagagttgtaccatcatttttcgaatgcaataaagagtgtgtttggcatgactccgt

SEQ ID NO: 4388 - DNA, 2960 bp, Zea mays
tcgcgaggcggcttaaacttaggtcggctcggagtggctcatgagcctcgagcgagcagagacgaaccgagccaagttgtagagctcattggtataacaagccgagtcagtttgcaagttatgccaaattaatgaatctataaaataataatagatattggataattttatagatattcgactcgttccttatcatttaatgatggatttatgataatttaaaatttagattacttataatgttaaatgatggtcatatttcatatctatatacaataatagtcattgtataatgcaatattatttatcaaggtgtagctcgcgagttgagtcgagcctccttcttaatcttattgagtggacgaaccaagctgagccgagtcgagcttggtcacccagcgagtcgagcctccttcttaaactcgttgaatgagactcagctcatttctagccctaaaaaatcgcatcatcatcggcataaagcgagcaatgcagacatttttggtagtacaagcttcggatgaccggctgcagacgctttctcaataaccttctgtaggggatcaatggccaagatgaaagagggtcaccttgatgaagacttcaggcgtgtttaaattttttgcttgggcgatcattcactagcactttggaagatgatgtagccaagatgctagtctctctatttttgactgaaacctagctagagcttttaaaacatcccggagatagttaagggaatcaaaggcttttgaaatgtccaatagataccattttttttcttgtggaggaggctatgaataacattttgttcatatagaaaattatcacattatgtgacaagcaagggaaaataacttatatatagttaatagtggagggagtgtctgatataaaaagctacatatttttgctggttagttgttagttaggtctttacctgccctctctctacgaacgagctgatgccagttctgactttgtcaaagcatggctggcaatgtgattgaatgcctgatgttagctcgtcaccttgacagggacatccgatcctgaatttccgattggggtggcaaaggtcaagttgccaccacaagcatccagtccaatggctctgccactgcccagaagcttcatcacacctagaggtagccatgacaggacccaaaaaaaggtccagtccaggtccgtaccagctgcgacgacgcttgtcagtaggtaggttgagctagctgcttgttgatcactgctatatatacgggtgccatggatccatgccttctccatcctcaagtcatcagctagctagccttccctacagcaactgcttacatacaacacttccatcttcccgagctcgtcttcgatcaattcccaagtcaaataataatataacaacaatggtggttcccgtcatcgacttctccaagctggacggcgctgagagggccgaaaccctggcgcagatcgccaatggctgcgaggagtggggattcttccagctcgtgaaccacggcatcccgctggagcttcttgagcgcgtcaagaaggtgagctccgactgctaccgcctccgggaggccgggttcaaggcgtcggagccggtgcgcacgctggaggcgctcgtcgacgcggagcggcgcggcgaggttgtggccccggtggatgacctggactgggaggacatcttctacatccacgacggatgccagtggccgtccgagccgccggcgttcaaggagaccatgcgcgagtaccgcgccgagctgaggaagctcgccgagcgcgtcatggaggccatggacgagaacctcggcctcgccaggggcaccatcaaggacgccttctccagcggcggccggcacgagcccttcttcggcaccaaggtcagccactacccgccgtgcccgcgcccggacctcatcacgggcctgcgcgcgcacaccgacgccggcggcgtcatcctgctgttccaggacgacagggtcggcggcctggaggtgctcaaggacggccagtggaccgacgtgcagccgctcgcgggcgccatcgtcgtcaacactggcgaccagattgaggtgctcagcaacgggcgctaccgcagcgcctggcaccgcgtgctgcccatgcgcgacggcaaccgccgctccatcgcttccttctacaacccggccaacgaggccaccatctcgccggcggcggtgcaggccagcggcggcgacgcataccccaagtacgtgttcggcgactacatggacgtgtacgccaagcacaagttccaggccaaggagcccaggttcgaagccgtcaaggttgcagcgcccaagtcatctccagcggcataaataaatggaggggaccaattattaaatgcattataatttatttgttgaataaaacagccggagaaataatgataatgtaaagtatatatgataaacaccggttaggatttaaggtgtttaactttagttgcatggtataatatgatatattgttgtagcaataagtttattaagtattcataagtgttctaaatagtgggctaaggcacttatccatcgcctttctcaaacagaaaatagtgatttaattcgggctatagcgactaatagttgctatatatattaggcgtagtagcaaacaatttcaccctttggaaacagttatatctagaaataactatagccagagatttagaaccttgttaatcatgtagaaattaaaggttcgtcaagtcagagcggcaccgaacaagataaaaatgtgacctcccctatatgcaaatgtctgccaacttattacattggtgggtgccatcttactatgtacaaatatatcgcggaaaccatattatcagcgtcgagaattggccatacccctggatattgataatatgccttgcgagatctattgagctgaagaaaactcgtagggggtctagctagtgccatacctaa

SEQ ID NO: 4389 - DNA, 1240 bp, Zea mays
gccaagaattcggcacgaggctagctagccttccctacagcaactgcatacatacaacacttccatctgcccgctcgtcttcgatcaattcccaagtcaaataataatataacagcaatggtggttcccgtgatcgacttctccaagctggacggcgctgagagggctgaaaccctggcgcagatcgccaatggctgcgaggagtggggattcttccagctcgtgaaccacggcatcccgctggagctgctcgagcgcgtcaagaaggtgtgctccgactgctaccgcctccgggaggccgggttcaaggcgtcggagccggtgcgcacgctggaggcgctcgtcgacgcggagcggcgcggtgaggtggtggcgccggtggacgacctggactgggaggacatcttctacatccacgacggatgccagtggccgtccgacccgccggcgttcaaggagaccatgcgcgagtaccgcgccgagctgaggaagctcgccgagcgagtcatggaggccatggacgagaacctcggcctcgccaggggcaccatcaaggacgccttctccggcggcggccggcacgatcccttcttcggcaccaaggtcagccactacccgccgtgcccacgcccggacctcatcacgggcctgcgcgcgcacaccgacgccggcggcgtcatcctcctgttccaggacgacaaggtcggtggcctggaggtgctcaaggacggcgagtggaccgacgtacagccgctcgagggcgccatcgtcgtcaacaccggcgaccagatcgaggtgctcagcaacgggctgtaccgcagcgcttggcaccgcgtgctgcccatgcgcgacggcaatcgccgctccatcgcatccttctacaacccagccaacgaagccaccatctcgccggcggcggtgcaggccagcggcggtgacgcgtatcccaagtacttgttcggcgattacatggacgtgtacgtcaagcagaagttccaggccaaggagcctaggttcgaagccgtcaagacgggggcgccaaagtcatctccagcggcataaataaacagggaaaacaattattgaatgcattattaaaaggtagtaataagtttgttaagtattaactagctagttgccctctttgctatatatatatatatatatatataaaataggtgagtgtccgtgcgttgcaacagaaatatataataccacgacaagttatataaaaaaaaaa

SEQ ID NO: 4390 - DNA, 1219 bp, Zea mays
cttccatcttcccgagctcgtcttcgatcaattcccaagtcaaataataatataacaacaatggtggttcccgtcatcgacttctccaagctggacggcgctgagagggccgaaaccctggcgcagatcgccaatggctgcgaggagtggggattcttccagctcgtgaaccacggcatcccgctggagcttcttgagcgcgtcaagaaggtgagctccgactgctaccgcctccgggaggccgggttcaaggcgtcggagccggtgcgcacgctggaggcgctcgtcgacgcggagcggcgcggcgaggttgtggcgccggtggatgacctggactgggaggacatcttctacatccacgacggatgccagtggccgtccgagccgccggcgttcaaggagaccatgcgcgagtaccgcgccgagctgaggaagctcgccgagcgcgacatggaggccatggacgagaacctcggcctcgccaggggcaccatcaaggacgccttctccagcggcggccggcacgagcccttcttcggcaccaaggtcagccactacccgccgtgcccgcgcccggacctcatcacgggcctgcgcgcgcacaccgacgccggcggcgtcatcctgctgttccaggacgacagggtcggcggcctggaggtgctcaaggacggccagtggaccgacgtgcagccgctcgcgggcgccatcgtcgtcaacactggcgaccagattgaggtgctcagcaacgggcgctaccgcagcgcctggcaccgcgtgctgcccatgcgcgacggcaaccgccgctccatcgcttccttctacaacccggccaacgaggccaccatctcgccggcggcggtgcaggccagcggcggcgacgcataccccaagtacgtgttcggcgactacatggacgtgtacgccaagcacaagttccaggccaaggagcccaggttcgaagccgtcaaggttgcagcgcccaagtcatctccagcggcataaataaatggaggggaccaattattaaatgcattataatttatttgttgaataaaacagccggagaaataatgataatgtaaagtatatatgataaacaccggttaggatttaaggtgtttaactttagttgcatggtataatatgatatattgttgtagcaataagtttattaagtattcataagtgttctaaatagtgggctaaggcacttatc

SEQ ID NO: 4391 - DNA, 1297 bp, Hordeum vulgare subsp. vulgare
gatctcatccagcacctgcagataacaaccatctcattgtagagagatcagatcagagcctacctagcttctcagttctcactcatcttcgcccaagaatttcaccatggttgtcccggtcatcgacttctcgaagctcgacggcgccgagagggcggagacgatggcgcagatcgccgacggctgcgagaactggggcttcttccagctggtgaaccacggcatccccttggagcttcttgatcgcgtcaagaaggtgtgctccgagagctaccgcctgcgggaggccgcgttccggtcgtcggagccggtgcagacactggagaggctcgtggaggcggagcggcgcggcgaggcggtggcgccggtggacgacatggactgggaggacatcttctacctccacgacgacaaccagtggccctccgacccgccggccttcaaggagaccatgcgggagtaccgcgccgagctcaagaagctcgcggagcgggtcatggaggccatggacgagaacctcggcctggacaagggccgcatgaaggccgccttcaccggcgacggcctccacgcaccattcttcggcaccaaggtcagccactacccgccgtgcccgcgcccagacctcatcaccggactccgcgcgcacaccgacgccggcggcgtcatcctgctgttccaggacgacaaggtcggcggccttgaggtgctcaaggatggccagtggctggacgtgcagccgctccccgacgccatcgtggtcaacaccggcgaccaggtggaggtgctcagcaacggccgctaccgcagcgcttggcaccgcgtcctgcccatgcgcaacggcaaccgccgctccatcgcgtccttctacaacccggcgttcgaggcggccatctcgccggcggtgggcgaaggcggcgccgccgcgtacccggactacgtgttcggagattacatggacgtgtacaacaagcagaagttcgatgccaaggagccaagattcgaggccgtcaaggcgccgaagtcagcttaataagcttataatcaaggagattaaaagaaaattatttacctattagcttgctttgttttacaatgaagaaaactatgtttttttggagtttatttagacgcgtaacaatgtgatgtggggatacttatgattggttcggtgtgaaataattggaaaatgaaatactgtggatttttcattggaagtatctgtttactttacatgagccccgcttcgatacaaatgtatcactcatccctgataaatatataaagtataatatag

SEQ ID NO: 4392 - DNA, 1118 bp, Hordeum vulgare subsp. vulgare
ggctcatcccatcaccttacatccacaagtttgcacacaacaccacccgagtctgaaactctgagaaagctcatcgtcgccaattcaccatggttgttccggtgatcgacttctccaagctcgacggcgccgagagggcggagaccatggcgcagatcgccgacggctgcgagaactgggggttcttccagctggtgaaccacggcatcccgctggagcttcttgaccgcgtcaagaaggtgtgctccgagagctaccgcctccgcgaggcggcgttccggtcgtcgaagccggtgcagacgctggagaggctcgtggaggcggagcggcgcggcgaggcggtggcgccggtggacgacatggactgggaggacatcttctacctccacgacaacaaccagtggccttccgatcctccggccttcaaggagaccatgcgggagtaccgctccgagctcaagaagctcgcggagcgggtcatggaggccatggacgagaacctcgggctggacaagggacgcatgaaggcggccttcaccggcgacggcctccacgcgccattctttggcactaaggtcagccactacccgccgtgcccgcgcccggacctcatcaccgggctccgcgcccacaccgacgccggcggcgtcatcctgctgttccaggatgacaaggtcgggggccttgaggtgctcaaggatggccagtggctggacgtgcagccgctcgccgacgccatcgtggtcaacaccggcgaccaggtggaggtgctcagcaacggccgctaccgcagcgcttggcaccgcgtcctgcccatgcgcaacggcaaccgccgctccatcgcctccttctacaacccggcgttcgaggcagccatctcgccggcggtgggcgaagccggcgccgccgagtacccggactacgtgttcggggattacatggacgtgtacaacaagcagaagttcgaggccaaggagccaagattcgaggccgtcaaggcgccaaaggcagcttaagatgaatcaaggagattgaagagacgtatttatttattatctggatatatacaacccttgtacggagtatatttgatctaaatatatggaccatcccactag

SEQ ID NO: 4393 - DNA, 1314 bp, Oryza sativa Japonica Group
atcaactgcaagcttacatcacactagctaattagctacttactcttcttcttgctagcttgctagcttctgcatttagacattgcaaaatctgaaaaaacttgagaaattaactaaacaaaatggttgttccggtgatcgacttctccaagctcgacggcaccgccgcagagagggctgagacgatggcgcagatcgacaatggctgcgaggagtggggattcttccagctggtgaaccatggcgtcccgaaggagcttcttgatcgggtgaagaaggtgtgcttggagagctaccgactccgggaggcggcgttcatggagtcggagccggtgaggacgctggaggggctcatggcggcggagcggcgcggcgaggcggcggcgccggtggacgacatggactgggaggacatcttctacctccacgacgacaaccagtggccgtcgaacccgccggagttcaaggagacgatgcgcgagtaccgcgcggcgctgcgggggctcgccgagagggtgatggaggccatggacgagaacctcggcctcgacaaggggcgcatgaggcgcgccttcaccggcgacggccgccacgcgccgttcttcggcaccaaggtcagccactacccgccgtgcccgcgccccgacctcatcaccggcctccgcgcccacaccgacgccggcggcgtcatcctgctgttccaggacgaccgcgtcggcggcctccaggtgctcaggggcggcgagtgggtcgacgtgcagccgctcgccgacgccatcgtcgtcaacaccggcgaccaggtggaggtgctcagcaacggccgctaccgcagcgcgtggcaccgcgtcctccccatgcgcgacggaaaccggcgctccgtcgcgtcgttctacaacccggcgttcgaggccaccatctcgccggcggtgggcgccggcggcgagtacccggagtacgtgttcggcgagtacatggatgtgtacgccaagcagaagttcgatgcgaaggagccacgcttcgaggccgtcaaggcgccaaaatctgcttaaagttaaaaatagacttttatttgtgaattaattaattgattagttgcataaactatacataaccgcttttgctattcaagataaaaaaataggtgaccttacaaaatttaagtggttattattgtcatgagaatacaactattgttatgttacagtatatagtttggtattttagtgtgtcacggtttgtcagtaggaatatataataatgtaatagatcgtgttgttatatatacatgaataaactatatagatttttttaatt

SEQ ID NO: 4394 - DNA, 1639 bp, Zea mays; identical to SEQ ID NO: 1105

SEQ ID NO: 4395 - DNA, 1574 bp, Sorghum bicolor
gctcgagcacacagctgcagaccagagagacgcacacaaatcagagcgggggggcgaggatgaaggtggaggtggtggagacgacgctggtgccgccgagcgaggcgacgccgcggcacgcgctgtggctgtccaacctggacctggcggtgcccaagacccacacgccgctcgtctactactacccgaggccgcccgaccccgaccccgagcccgacgccgacgcgcccgccggggaggggtcgttcttcgacccggcgcgcctgcgggaggcgctcgccagcgcgctggtggcgttctacccgctggcggggcggctcgtggtcggccagggcgggcggatcgagatcgactgcaccggcgagggcgcgctgttcgtcgtcgcgcgcgccgacttcaccggggacgacatgttcagggacttcgagccgtcccccgaggcgcgccgcctgctcgtgcccttcgccgaatccggcgacccgccctgcgtgctcgccatggtccaggtgaccttcctcaagtgcggcggcgtggccgtgggcacgggcatgcaccacgtcacgatggacggcgcgggcgcgatccagttcatccgggcgtggacggcgctggcgcgcggggagtcccccacgtgggcgccgtcccacgaccggacgctcctccgcgcgcgctccccgccgcacgtgcccttcgagcacccggtctactcgccggcctacctcaacgggtccccgcgtcccttcgtgacgcgcgtctacaccgtcccgcccaagctcctggcgggcatccggtcgcggtgcgcgccgggggcgtccacgtactgcgcggtgaccgcgcacctgtggcgcgccatgtgcgtggcgcgtgcgctccccgccgacggcgagacgcggctccgcgtgcccgccaacgtccggcagcggctccggccgccgctcccggccacctacttcggcaacgccatcgtgcgggacctggtgaccgtgaaggtgggcgacgtgctgtcgcagccgctcgggttcgtggcggaccggatcaagcgcgccgtgtcccgcgtcgacgacgccttggtgcgctccgtcgtcgactacctggagctggaggccgagaagggcaaccaggcggcgcgcgggcagttcatgccggagtccgacctctgggtcgtcagctggctcggcatgcccatccacgacgccgacttcggctggggccgccccgggttcgtggcgcccgcgcagatgttcggcagcggcacggcctatgtgacgcagggctacgacaaggacgaccccatcaacgtcctcttcgcgctcgagcctgagtacctgcagaccttcgagaaggcattctacggggagtgaccatgaccgtgactgatcgaccagccatggcgaggtctatagaggagtgggagagccagtcgtcccgctgtggatgcgaagtgattgtgatgccgccgtggtaacttccatcggttcgtgtggagagttggtccatgtgcatcgatctgctgggggcctctactgtactatatcgtagtgcatgtttcgagatgcaactcgatgcttaccgtg

SEQ ID NO: 4396 - DNA, 1657 bp, Hordeum vulgare subsp. vulgare
gcgcacacacgcgcgcgcgcacacgcaagaaccgccaagcaaaagcaagcaaagggcggaggggacaggcgagatcgagatgaaggtggaggtggtggacacgaggctggtgacgcccagcgagccgacgccgcggcacacgctctggctctccaacctcgacctcgccgtgcccaagacgcacacgccgctcgtctactactacccgtcgcccgccggcgacggcgacggcggcgagaaggaggcggaggggttcttcgcgccggagaggctgcgggaggcgctggcgagggcgctggtgccgttctacccgctggcgggccggatggcggcgggccccgagggccggctcgagatcgactgcaacggcgagggcgcgctcttcgtcgtcgcgcgggccgacttcaccggcgacgagatgttcagggacttcgagccctccccggaggcgcgccgcctgctcgtccccttcgccgcctccggcgacccgccctgcctactcgccatggtccaggtgacgttcctgaagtgcggcggcgtggccgtgggcacgggcatgcaccacgtgaccatggacggcgcgggcgcgatccagttcatccggacgtggacgaccctggcgcgcgggctggacgccgcgtccgtgtacccgaccccgccggtgcacgaccgcacggtgctgcgcgcgcgctctcccccgcacgtcgcgttcgagcacccggtctactccccgagcaacctcaacggcctgccccgccccttcgtcacccgcgtctacgccgtctcgcccaagctcctcgccggcatcaagtccagctgcgcgcccggcgtgtcgacctactgcgcgctcaccgcgcacctgtggcgcgccatgtgcgtggcccgcggcctggcccccgacgccgagtcgcggctgcgcgtgccggccaacatccggcagcgcctgcgcccgcagctgccggccaactacttcggcaacgccatcgtgcgggacctcgtgacggtgcgcgtcggcgacgtgctgtcgcagccgctggggttcgtggcggatcggatcaagcgcgcggtggcgcgggtggacgacgcgttcgtgcggtcggtcattgactacctggagctggagtcggagaagggcagccaggcggcgcgcgggcagttcatgccggagacggacctgtgggtggtgagctggctgggcatgcccatccacgacgccgacttcggctggggctgccccaagttcgtggcgccggcgcagatgttcggcagcggcacggcgtacgtgacgcaggcgcccgacaaggacgacggcgtgtccgtgctgttcgcgctggagcccgagtacctgcagtgcttcgagaaggccttctacggggagtgactgaccggcgaccgacgccgaccaagggcggcggtggcagtgatgcgccgcccatgtgctgtatcataatgcaccagatgctgcggaagtgttaaggttgctgcttgtttctcgcgccttttttcgccactctactgaatactatgtgacattctggtctaactattatctatacaaagtctaaatgaaaatggcctcagatttggccgtatcttacttgcatttgaatcaatccgtaggtgtcgatctatatgcataataatacagatataagtg

SEQ ID NO: 4397 - DNA, 1706 bp, Oryza sativa Japonica Group
acacacagaaattcacacccaagccgctgtcacaagcaaggcatccacacacacacagagaggtagagagggcgagatgaaggtggaggtggtggagacgacgctggtggcgccgagcgaggcgacgccgcagcacgcgctgtggctctccaacctcgacctcgccgtgcccaagacgcacaccccgctggtctactactaccccgcgccctcgccgccgccggcggatgcgggggcggaggcggaggcggaggggttcttcgcaccggagaggctgcgggaggcgctggcgagggcgctggtgccgttctacccgctggcggggcggctggcggcggggcccggcggccggctcgagatcgactgcaacggcgagggggcgctgttcgtcgtcgccagggccgacttcaccggcgacgagatgttcaccgacttcgagccctcccccgaggcccgccgcctcctcgtccccttcgccgcctccggcgagcccccctgcgtcctcgccatggtccaggtgacgttcctgaagtgtggaggcgtggccgtcggcacgggcatgcaccatgtcacgatggacggcgcgggcgcgttccagttcatccggacgtggacggggctgtcgcgtgggctcgacgccgcggccgcgtcgccgtcgccgccgtcgcacgaccgcaccctcctccgggcgcgctcgccgccgcacgtcccgttcgagcacccggtgtactccccgagctacctcaacgggctgccgcggccgttcgtgacccgcgtctactccgtcccgcccaagctcctcgccgacatcaaggccgcctgcgcccccggcgtgtccacgtacggcgcggtgaccgcgcacctgtggcgcgccatgtgcgtcgcccgggggctcccccacgacgccgagtcgcggctgcgcgtcccggccaacatccggcagcgcgtccgcccgccgctcccgtcgccctacttcggcaacgccatcgtgcgcgacctcgtcacggtgcccgtccgcgacatcctgtcgcagccgctggggttcgtggcggagcggatcaagcacgcggtggcgcgcgtggacgacgcgttcgtccgctcggtgatcgacttcctggagctggagtccgagaaggggaaccaggcggcgcgcgggcagttcatgccggagacggacctgtgggtggtgagctggctcgggatgcccatctacgacgccgacttcgggtgggggcgcccggcgttcgtggcgccggcgcagatgttcggcagcggcacggcgtacgtgacgcaggcgccggacaaggacgacggcagcggcggcggcgtgtccgtgctgttcgcgctcgaaccggagtacatccagtgctttgagaaggccttctacggcacagagtgatatgatgcggcggcggcggcggtggccggagtttagagctggaggacatcgagcgacctgggatgcatgatgacgccgaggtggtgtcgacgtctgctgactctgtgtcatgctcaatacataacataatatgcgttatttgatttgcggtagaagtatttagtgtatgctggtactgtgcaacagtgcaagtgtaatgagctgctgccttgttggttgcagctctctctacacagacactttggtctgtcttaagttcgtatgtacaaaaaaaaaatcaaatggaaatgaaaatgactatggaagc

SEQ ID NO: 4398 - DNA, 1696 bp, Zea mays
aacacagagctacctactgtaaacattcaacactcaagagccaagagggagagacgatgaaggttgatgtggtggggacgacgcttgtggcgccgagcgaggacacgccgcacccggagctgtggctgtcgaacctggacctggcagtccccaagacgcacacgccgctcgtgtactactacccggcgccggcggccggaggcgacaccgacggagaagcggccttcttcgcgccggagcggctcgaggcggcgctggccaaggcgctggtgccgttctacccgctggcggggaggctgggcgtgggcgagggcgggcgcctgcagatcgactgcaccggcgagggcgcgctcttcgtcgtcgccagggccgacttcgccggcgaggacgtgttcagtgactacgagccgtcgccggaggtcaggcggctgttcgtgccgttcgcggcgtccggagacccgccctgcgtcatgtccatgttccaggtgacgttcctcaagtgcggcggcgtggtgctgggcacgggcatccaccacgtgaccatggacggcatgggcgcgttccacttcatccagacctggaccggcgtggcgcggggcctcgacacggccgaggcgtgcggcccgctgccgttccacgaccggacgctcctccgcgcgcgctctccgccggccccggccttcgaccacccggtctactcgccggctctgctcaacggcgtgccccggcccttcgtcacccgcgtctacgccgtctccccgaagcttctcgctggcatcaagtcccgctgcgcgccgggcgtgtccacctactgcgccgtcaccgcgcacctctggcgttgcatgtgcgtcgcgcgcgggctcgccccgggctcggacacgcggctccgcgtgccggccaacgtccgccaccgcctgcgcccgccgctcccgcggagctacttcggcaacgccatcgtgcgcgacctcgtgaccacccgggtggaggacgtcctggaacgcccgctcgggttcgtggcgcaggcgatcaaggacgcggtggaccgcgtcaatgacgcctacgtgcgctccgtggtcgactacctggaggtggagtcggagaagggcagccaggcggcgcgcgggcagctcatgccggagtccgacctgtgggtggtcagctggctcgggatgcccatgtacgacgccgacttcgggtggggcacgccgcggttcgtcgcgccggcgcagatgttcggcagcggcacggcctacgtcacgcagcgcgccaacagggacgacggcctcgccgtgctcttcgggctggagcccgagtatctgcagtgcttcgaaaaggtgttctatggagagtgagtcgtgagattactagtgtcatccgcgtttcgtcgtgagcaccgagtgcgattactgtagcttggaacctgatgctgtggatgtgggctttgcaaattactccggtttctgtgttttttttcctagtattctcatgtggtttttaggtgctcagtcgagacttgagagagaacatagctgcgttgactttagcatggtttaatttcaactctatgggtctctatctattgtcacattagctatccaccgtactatcgattctattgtcggccgttgtcaaccatatctatagcatggtcgtacaaaaaaaaaaaaaaaaaaaaaaaaaaaaaaaaaaaaaaaaa

SEQ ID NO: 4399 - DNA, 1571 bp, Zea mays
ctactgtaaacattcaacactcaagagccaagagggagagacgatgaaggttgatgtggtggggacgacgcttgtggcgccgagcgaggacacgccgcacccggagctgtggctgtcgaacctggacctggcagtccccaagacgcacacgccgctcgtgtactactacccggcgccggcggccggaggcgacaccgacggagaagcggccttcttcgcgccggagcggctcgaggcggcgctggccaaggcgctggtgccgttctacccgctggcggggaggctgggcgtgggcgagggcgggcgcctgcagatcgactgcaccggcgagggcgcgctcttcgtcgtcgccagggccgacttcgccggcgaggacgtgttcagtgactacgagccgtcgccggaggtcaggcggctgttcgtgccgttcgcggcgtccggagactcgccctgcgtcatgtccatgttccaggtgacgttcctcaagtgcggcggcgtggtgctgggcacgggcatccaccacgtgaccatggacggcatgggcgcgttccacttcatccagacctggaccggcgtggcgcggggcctcgacacggccgaggcgtgcggcccgctgccgttccacgaccggacgctcctccgcgcgcgctctccgccggccccggccttcgaccacccggtctactcgccggctctgctcaacggcgtgccccggcccttcgtcacccgcgtctacgccgtctccccgaagcttctcgctggcatcaagtcccgctgcgcgccgggcgtgtccacctactgcgccgtcaccgcgcacctctggcgttgcatgtgcgtcgcgcgcgggctcgccccgggctcggacacgcggctccgcgtgccggccaacgtccgccaccgcctgcgcccgccgctcccgcggagctacttcggcaacgccatcgtgcgcgacctcgtgaccacccgggtggaggacgtcctggaacgcccgctcgggttcgtggcgcaggcgatcaaggacgcggtggaccgcgtcaatgacgcctacgtgcgctccgtggtcgactacctggaggtggagtcggagaagggcagccaggcggcgcgcgggcagctcatgccggagtccgacctgtgggtggtcagctggctcgggatgcccatgtacgacgccgacttcgggtggggcacgccgcggttcgtcgcgccggcgcagatgttcggcagcggcacggcctacgtcacgcagcgcgccaacagggacgacggcctcgccgtgctcttcgggctggagcccgagtatctgcagtgcttcgaaaaggtgttctatggagagtgagtcgtgagattactagtgtcatccgcgtttcgtcgtgagcaccgagtgcgattactgtagcttggaacctgatgctgtggatgtgggctttgcaaattactccggtttctgtgttttttttcctagtattctcatgtggtttttaggtgctcagtcgagacttgagagagaacatagctgcgttgactttagcatggtttaatttcaactctatgggtctctatctattgtc

SEQ ID NO: 4400 - DNA, 1588 bp, Sorghum bicolor
acagagctatcagcattcaacactcatcaacagccaacagctagcgagagagagagagagagagagagagtacagacgagagggggacagacagacagagacgatgaaggtcgacgtggtggggacgacgctggtggcgccgagcgaggacacgccgcgccgggagctgtggctgtccaacctggacctggccgtgcccaagacgcacacgccgctcgtgtactactacccggcgccggcgccggcggccgccacgggcacggacgacggaggagaccgggcggccttcttcgcgccggagcggctggaggcggcgctggccagggcgctggtgccgttctacccgctggcggggaggctgggcgtcggcgtgggcgagggcggacgcctgcgcatcgactgcaacgcccagggcgcgctcttcgtcgtcgccagggccgacttcgccggcgaggacgtgttcggcgacaccgacggcggctacgagccgtcgccggaggtcaggcggatgttcgtgccgttcgtgccgtccggcgacccgccctgcgtcatgtccatgttccaggtgacgttcctcaagtgcggcggcgtggtgctaggcacgggcatccaccacgtgaccatggacggcatgggcgcgttccacttcatgcagacctggaccggcgtggcgcggggcctcgacgtcgccgaggcgtgcggcccgctgccgccgttccacgaccggacgctcctccgcgcgcgctccccgccgacgccggccttcgaccacccggtctactcgccgtccctgctcaacggccggccccgccccttcgtcacccgcgtgtacgccgtctcgccgaagctcctcgccgacgtcaagtcccgctgcgcgccgggcgtgtccacctactgcgccgtcaccgcgcacctgtggcgctgcatgtgcgtggcgcgcgggctggcgccgtgctccgacacgcggctccgcgtcccggccaacgtccgccaccgcctccgcccggcgctcccgcggagctacttcggcaacgccatcgtgcgcgacctcgtcgtcgcccgggtggaggacgtcctggaccgcccgctcgggttcgtggcgcaggccatcaaggacgccgtggaccgcgtcgacgacgcctacgtgcgctccgtggtggactacctggaggtggagtcggagaagggcagccaggcggcgcgcgggcagctcatgccggagtccgacctgtgggtggtcagctggctcgggatgcccatgtacgacgccgacttcggctggggcacgccgcggttcgtcgcgccggcgcagatgttcggcagcggcacggcgtacgtgacgcagcgcgccaacaaggacgacggcatcgccgtgctctttgggctggagccccagtatctgcagtgcttcgagaaggtgttctatggggagtgagtcgtgagattactacacttgactaatgactagtgccatccgcgtttcaccgtgagcaccgaccaccgagtgtggtggttacagtagctgagcctgatgctctggatgtgtgctgtgtgcatataaaaaaaaaatcgctccgatttctgtgtc

SEQ ID NO: 4401 - DNA, 1583 bp, Hordeum vulgare subsp. vulgare
gccaagcaaaaccacagccaaaagacgatcgaggttacacaaccaaggcgctgcacacagtttgtccgagagggacagagtgagatgatgaaggtggaggtggtggagtcggcgctggtggcgccgagcgaggagacgccgcggcgggagctgtggctctccaacctcgacctggccgtgcccaagacgcacacgccgctcgtctactactacccggccccggccccggccacggcggcgccggacgcggaccctgccggcttcttctcgccggagcggctcagggcggcgctggccagggcgctggtgctcttctacccgctggccggccggctcggacgagagggcgagggcgggcggctgcagatcgactgcagcggcgagggcgcgctctttgtcgtggccagggcgccggacgtcgccggggacgagctcttcgggagcggctacgagccctcgccggagatcaggcgcatgttcgtgcccttcgcgccctccggcgacccgccctgcctcatggccatgttccaggtgacgttcctcaagtgcggcggcgtggtgctgggcacgggcatccaccacgtgaccatggacggcatgggcgcgttccacttcatccagacatggacggggctcgcgcggggcctggccctctccgaggcgtgcccgtcgccgccgttccacgaccgcacgctcctccgcgcgcggtcaccgccgcgccccgaattcgaccacccggtgtactcgccggagtacctcaacggcgccccgcggcccttcgtcacccgcgtctactccgtgtccccgaagctcctcgccgacctcaagtcccggtgcgcgcccggcgcgtccacctacggcgccgtgacggcgcacctctggcgctgcatgtgcgtggcgcgcgggctcgcggcgggctccgacacgcgcctccgcgtgccggccaacatccggcaccggctgcggccgccgctcccgcggcagttcttcggcaacgccatcgtgcgcgacctggtgaccgtcaaggtgggcgacgtgctggcgcagccgctggggtacgtggccgacacgatccggaaggcggtggagcacgtcgacgacgcctacacccggtcggtgatggactacctggaggtggagtcggagaagggcagccaggcggcgcgcgggcagctcatgccggagtcggacctgtgggtggtgagctggctggggatgcccatgtacgacgccgacttcggatggggcgcgccgcggttcgtggcgccggcgcagatgttcggcagcggcacggcgtacgtgacgcagcgcggcgccgacagggacgacggcatcgccgtgctgttcgcgctggagccccagtacctgcactgcttccaggacgtcttctacggggagtgaccacatcgccttccctccttcctcgtgtgtccgtcggtgtgtatgactctgtcgattttatagcgtttgctcttcactaccactcttgctgatacttggcacgagatgttcagtttgttgtagtatagtataccaagaactggtttcaaaatttggcattacagtgcatctgccgttcgtcg

SEQ ID NO: 4402 - DNA, 1361 bp, Hordeum vulgare subsp. vulgare
gaccgagcgaggagacgccgcggcgggagctgtggctctccaacctcgacctggccgtgcccaagacgcacacgccgctcgtctactactacccggccccggccccggccacggcggcgccggacgcggaccctgccggcttcttctcgccggagcggctcagggcggcgctggccagggcgctggtgctcttctacccgctggccggccggctcggacgagagggcgagggcgggcggctgcagatcgactgcagcggcgagggcgcgctctttgtcgtggccagggcgccggacgtcgccggggacgagctcttcgggagcggctacgagccctcgccggagatcaggcgcatgttcgtgcccttcgcgccctccggcgacccgccctgcctcatggccatgttccaggtgacgttcctcaagtgcggcggcgtggtgctgggcacgggcatccaccacgtgaccatggacggcatgggcgcgttccacttcatccagacatggacggggctcgcgcggggcctggccctctccgaggcgtgcccgtcgccgccgttccacgaccgcacgctcctccgcgcgcggtcaccgccgcgccccgaattcgaccacccggtgtactcgccggagtacctcaacggcgccccgcggcccttcgtcacccgcgtctactccgtgtccccgaagctcctcgccgacctcaagtcccggtgcgcgcccggcgcgtccacctacggcgccgtgacggcgcacctctggcgctgcatgtgcgtggcgcgcgggctcgcggcgggctccgacacgcgcctccgcgtgccggccaacatccggcaccggctgcggccgccgctcccgcggcagttcttcggcaacgccatcgtgcgcgacctggtgaccgtcaaggtgggcgacgtgctggcgcagccgctggggtacgtggccgacacgatccggaaggcggtggagcacgtcgacgacgcctacacccggtcggtgatggactacctggaggtggagtcggagaagggcagccaggcggcgcgcgggcagctcatgccggagtcggacctgtgggtggtgagctggctggggatgcccatgtacgacgccgacttcggatggggcgcgccgcggttcgtggcgccggcgcagatgttcggcagcggcacggcgtacgtgacgcagcgcggcgccgacagggacgacggcatcgccgtgctgttcgcgctggagccccagtacctgcactgcttccaggacgtcttctacggggagtgaccacatcgccttccctccttcctcgtgtgtccgtcggtgtgtatgactctgtcgattttatagcgtttgctcttcactacc

SEQ ID NO: 4403 - DNA, 1098 bp, Zea mays; identical to SEQ ID NO: 1106

SEQ ID NO: 4404 - DNA, 696 bp, Sorghum bicolor
atggcgctggcgcggcggcttctccgccttagtccccacctcggcacgctcccgctcccatcccccaactcctcgaacctcatcgggactcgcacctacatctcggacatgcgccgctccgccttcgtcgaccgcctcctccgctccgtacgctccgagatctcctccctcagtaacttcgcgccgccaccgtctcccccaccccctacgccattcaccgtcgaggaccgcccgggcgagcagtggacccgcctgcgccgcgtgttccccgcggccgagggggaggaagaggaggtcagggtggacgccacgttggtagacggcgcgctccctgcctcccgctccggcgcggacacgggcggtccgcccaggctgcacatcagcgtcaatgtcgaggtctccaaggccgcgcggcctggagtggtgctcaccttcgagtgctccgcgtggcccgacgagatggaggtgcggagggtctttcccgtccgccgcggcgggcctgcgccagtgcagcagtacatcggccgccaattcagtgagttagatgaggaaatgcaaagcgcggtgcaagattatctggagcaaattggagtgaatgatgaccttgctgcatttctgcacgcgtacatggaaaacaaggagcatactgaacttatcagatggctgaaaaacattgagtgccatatcaagaaatga

SEQ ID NO: 4405 - DNA, 899 bp, Zea mays
gcgagctatggcgctggcgcggcggctgctccgccttactccctacctcggcacgctctcgctcccaccccccaactcgcatctcctccggaatcgcacctatatctctgacatgcgccgctctgccttcgtcgaccgcttgctccgttccgtacgctccgagatctccttcctcgataactccgccccgccaccgccaccaccgcctcctaagccattcaccattgaggaccgcccgggcgagcagtgggcccgcctgcgccgcgtgttccctgcggccgagggggaggaagaggaggtcagggtggacgccacgttggtcgacggcgcgctccctccctcccgctcgggcgcggacacgggcggcccgcccagaatgcatatcagtgttaaggttgaggtctccaaggccgcgcggcctggagtggcgctcaccttcgagtgctccgcgtggcctgacgagatggaggtgcggagggtctttcccgtccgccgcggcgggcctgccccagtgcagcagtacgtcggccgccaattcagtgagttggatgaggaaatgcaaagtgccgtacaagactacctggagaaaattggagtgaatgatgaccttgctgcatttttgcacgcctacatggaaaacaaggagcacactgaactgatcagatggctgaaaaacgttgagtgccatatcaagaagtgaacattctagtcgggttaatactttgtcctacagcacttgcagatgcagcttttgatcgcaatcttggaactttactaggccccatttaaatccttagaattgattaagctcatattgttgtatgagaaatatcacgcctacatggaaaacagggatcatactgaacttatcagatgactgaaaaacgtagtgccatatc

SEQ ID NO: 4406 - DNA, 1134 bp, Zea mays
ccaccatttgtccattccccctccatcattcctccccgctttctccaccatcagggcgaaaattttatgcgagctttggaaagcgcgagctagtttatccggccgggcgtggtcaccgaggcagtagcggcgagagaggggaggatctgatcgatgtcgtcgggcgaggacgggtactgcagctcggattcgccgcgggcggaatcccccgaccagccgcaggcagctgcggcggcggacgcggacgcggacgcggagtcgcctcgcgccggagccgggccgaacaagcgcgacctccacgcctcgtcgccggcagctaagcgcagccggagatcggtggagaagcgggttgtgtcggtgccgctggccgagtgcggggaggggccgccgccgtctgactcgtgggcgtggcgcaagtatgggcagaagcccatcaagggctccccctacccacgtgggtactaccgctgcagcagctccaaggggtgccccgcgaggaagcaggtggagcgcagccgcgccgaccctgccgtgctgctcgtcacctacaccttcgaccacaaccacgaggcgccgcggcccaagagcagctgctgccaccagcaaggcaggccgccggcgccgaagcctgatgagcccgtggccgagcaggaggatgagctgggtccggagcatgagccggaagacgagcaggagccggagcagaaggtcgtcccaggtctggccgggccggaaacggcgccggcaaccgcaacgttggcgccggtggcagaggaggacgaaagcttcgacttggggtggttcgaccagtacccgacgtggcaccgttcggcgctgtacgcgccgctgctgccgccggaggagtgggagcgggagctgcagggggaagacgccctgttcgcgggcctcggcgagctgcccgagtgcgccgtcgtgttcggccgccgccgcgagctcagcctggccgctaccgcgccgtgctcctgatggtccttaaagtcttttttacactagtagctctgatcgctgcacggggcatctgttcaaggccgtctgctgcctaagctttctgtccccgtgtccgtgttgattgggtacgcgcgttcgccgtccaaggttcgtttgtcccgtttg

SEQ ID NO: 4407 - DNA, 1153 bp, Zea mays
cgcgcatggcgatggcgagagagagagagagagagagtaggggagggatcattgaaagccgcagcgcccatgtcccaggcccgtctgttcgccaccatttgtccattccccctccatcattcctccccgctttctccaccatcagggcgaaaattttatgcgagctttggaaagcgcgagctagtttatccggccgggcgtggtcaccgaggcagtagcggcgagagaggggaggatctgatcgatgtcgtcgggcgaggacgggtactgcagctcggattcgccgcgggcggaaacccccgaccagccgcaggcagctgcggcggcggacgcggacgcggagtcgcctcgcgccggagccgggccgaacaagcgcgacctccacgcctcgtcgccggcagctaagcgcagccggagatgggtggagaagcgggttgtgtcggtgccgctggccgagtgcggggaggggccgccgccgtctgactcgtgggcgtggcgcaagtatgggcagaagcccatcaagggctccccctacccacgtgggtactaccgctgcagcagctccaaggggtgccccgcgaggaagcaggtggagcgcagccgcgccgaccctgccgtgctgctcgtcacctacaccttcgaccacaaccacgaggcgccgcggcccaagagcagctgctgccaccagcaaggcaggccgccggcgccgaagcctgatgagcccgtcgtggccgtggccgagcaggaggatgagccggaagactggcaggagccggagcagaaggtcgtcctaggtctggccgggccggaaacggcgccggcaaccgcaacgttggcgccggcgggagaggaggacgaaagcttcgacttggggtggttcgaccagtacccgacgtggcaccgttcggcgctgtacgcgccactgctgccgccggaggagtgggagcgggagctgcagggggaagacgccctgttcgcggggctcggcgagctgcccgagtgcgccgtcgtgttcggccgccgccgcgagctcagcctggccgctaccgcgccgtgctcctgatggtccttaaagtcttttttacactagtagctctgatcgctgcacggggtatctgttcaaggccgtctgctgccaaaaaaaaaaaaaaag

SEQ ID NO: 4408 - DNA, 1631 bp, Sorghum bicolor
atgacaccagccagcatcgttcgcataaaaaaaggcgcccactagcgcgcgcacccccgcatatacagacacgccgcgcatcgcgagcgagcgagagagagagagaaagagaggagggatcattgaaagccgcagcgcccatcatcgatccgcccccggcccgtctgttcgccaccatttccttcacccccttcttcttcaatcccctccatcattcgctccaatactccgcccctcccccccgcccgctttctccaccatcagggcgaaaattttatgcgcgctttgggaaagcgcgagttagttttgctttgaagctgcctgcctttttatccatccggggctgcgggcgtcgggagaagcacaggttcgagtccggctccgtgtactccggccgggcgtgggaaccgaggcggcagcggcggcaagagagagctagagagggggatctgatcgatgtcgtcggccgaggacggctactgcagctcggattcgccgcgggcggaatcccccgacgagccgctgctgcctgcggcggtggcggacgcggacgcggagtcccctcgcgccgccgggtccgggatgaacaagcgcgagcgcgacctcagcgacctccccgcctcgccgtcgtcgccgctgccgccagctaagcgcagccggagatcggtggagaagcgggtcgtgtcggtgccgctggccgagtgcggggaccggcccagaggggccaccggggaggggccgccgccgtcggactcgtgggcgtggcgcaagtatgggcagaagcccatcaagggctccccctacccacgtgggtactaccgttgcagcagctccaaggggtgcccggcgaggaagcaggtggagcgcagccgcgcggaccccaccgtgctgctcgtcacctacaccttcgaccacaaccacgaggcgccgcagccgaagagcagcagctgccaccagcaaggcaagccgtccacgcggccgccggcgccgaagcctgagcccgtggtcgagcaggatgagcttggtccggagcatgagctggcagaaacagaagtgccagagcagcaggagccggtggaagaggagcaggagcagaaggtcgtcccaggtctggccgggccggaagcggaagcggaagcggaaccaaccgcaacggtggcgccggcggcagccgaggaggacgaaagcttcgactttgggtggttcgaccagtacccgacgtggcaccgttcggcgctgtacgcgccgctgctgccgccggaggagtgggagcgggagctgcagggggaagacgccctgttcgcggggctcggcgagctgcccgagtgcgccgtcgtgttcgggcgacgccgcgagctcagcctggccaccaccgcgccgtgctcctgatgctgatgggctttcgactatttttacatttgttttcttttgctcccttttggcactagtacatagtagctctgatcgatgcacggggtttatctgttcaaggccggctgctgctgctgctgctgctgcctccccgtgttgatttggtgcgcgcgcgcgcgttcttgttcgttcgtgcgttcgccgtccaaaggttgtcccgtttgcgatgtgattccaaccagaaagcagcgaaaggtttg

SEQ ID NO: 4409 - DNA, 1193 bp, Oryza sativa Japonica Group
atggcggccggagaggaggtgatggatcggtcgacgtcggccgaggacgggtactgcagcgccggcacggactcgccgcgggcggagtccgtcgacgagcaaggggccgccgaggagtcgtcgccccggggagggcagaagcgggagctcccctcgccgtcggcttcgccgtcgtccccgctgccacctgccgcgaagcgcaggtacggataatattatggctcggtctgcgattgattaaagccctaggtaggatttagggatagaggattgattggtgtttggttggtttgagcagccggaggtcagtggagaagcgggtggtgtccgtgccgatcgcggagtgcggcgaccggccgaagggcgccggggaggggccgccgccgtcggactcgtgggcctggcgcaagtacggccagaagcccatcaagggctctccctacccaaggtaattaggctttatattcagtttggttgatattcttgagcctgttgattagttaccgtgctgattaatcactgcaattagatcagttaaacggttgttgaagtggcaagatttaatttgggtttgttgcttgtgtttattatgctcagggggtactacaggtgcagtagctccaaggggtgtccggcgaggaagcaggtggagcgcagccgcgccgaccccaccgtgctgctcgtcacctactccttcgagcacaaccacccgtggccgcagcccaagagcagcagctgccacgcgagcaagtcgtctccccggtcgacggcgccaaagcctgagccggtggctgacggacagcaccccgagccagcggagaacgaatcgtcggcgtcggcggagctggaggtaccggagccggagccggagcaggaatctgagccggttgtgaagcaggaggaggagcagaaggaggaacagaaggctgtggttgagccggcggcggtcacaaccacggtggcgccggcgccggcggtcgaggaggaggatgagaacttcgacttcggatggatcgaccagtaccacccgacgtggcaccggtcgtacgcgccgctgctgccgccggaggagtgggagcgcgagctgcaaggggacgacgcgctgttcgcggggctcggcgagctcccggagtgcgccgtcgtgttcggccgccggcgcgagctcggcctggcggccaccgcgccgtgctcct

SEQ ID NO: 4410 - DNA, 2078 bp, Sorghum bicolor; identical to SEQ ID NO: 1107

SEQ ID NO: 4411 - DNA, 1911 bp, Zea mays
gattctcctcggttcctccgccccgtagcagcctcgcgcgcccagccgtcgccgcgatcgcgagactgcgagagccttccgcccttccccttccccggccctgccgcgctgttcggcccgtcctccttccatccactcacgcgaagcttccagcagaggcgaccgccgcatcgagtctcggctgccgaggagtcgagtgatggaagtggtggcgtcggcgccggggaaggtgctcatcgcgggaggatacctcgtgctggagcgccccaacgccggcctagttctcagcaccaccgcccgcttctacgccgtcgtccgccccctccgcgacagcctcccagccgactcctggacctgggcatggacggacgtcaaagtgacttcccctcaactctcgcgggtggccacatataaattgtccctaaataaaacgacgctgcaattgacgtcttcaagggaatcgacaaacccttttgtggagcaggccatacaattctccgtagcagctgctaaagcgaccattattgataaggagaggaaggatgtagtagataagttactgctgcaaggtctgaacattacaattattggtcacaatgatttctattcttatagaaagcagattgaagcacgtggtctccctcttactccggaggtactgctttcattgcctccattctcttcaattacatttaactcagaggttgctaatggaacaatgactggagagaaatgtaaacctgaagtagccaaaactggacttgggtcatcagctgccatgaccacatcagttgttgcagctcttcttcactatcttggtgccgttaacctctcatgtccaggacaatcttctggcgacaatgcaagtggacgagaacttgacttggttcacactattgcccaaagtgcacattgtttagcacaagggaaaattggcagtggttttgatgttagtgctgctgtctatgggagtcaacgctatgtaaggttttctccagaaatactctcctcggctcaggctataggtgggactgtcttgccagatgtagtatcagatgttctaacacaaaggtgggatcatgagaataaacagttttcattacctcctctgatgacccttctccttggggaacctgggaccggaggatcatctactccatcaatggttggatctgtgaaacggtggctgaagtctgaccctgagaaatccagagatacatggagtaaactggccattgccaattcaacgctggagaaccaactgaggatcttaaacggactttctgaaaatcaccatgaagcatatgagtccatggtgaggtcctgtagtcatctcacatatgggaagtgggcagaggtggctactaaccaacatcaagaattaattataagatcattgttggctgcaagggatgcttgccttgagataaggcttcacatgcgagagatgggcatagcagctggtgttccaattgagccagattcacaaacacggctactagatgccactatgaatatggagggtgttttactggctggagttccgggagctggtggcttcgatgcagtgttctcagttgttttgggggatgcaagtaatgctgtagcacatgcttggagctctgttggcgttctgccacttcctgttcgagaagactgccgtggtgtttcattggaagacgctgacccgagaacaagggaggtgtcagcagctgtatggtccatccaaattaactgattctactgttaatagttctgtttatgcatggtgtaccaatatcatttattaacgatgttcgcattgctgcagttacaattcatagagacaacatagtataaatagtagaagctgttacggattaaagccaaactagcaggctctatcttttataagcaaaaaaaaaaaaaaaa

SEQ ID NO: 4412 - DNA, 1971 bp, Zea mays
ccaattcttctcggttcctccgcccccgtagcaccccgcgcgcccagccgtcgccgcgatcgcgagactgcgagagccttccgcccttccccttccccttccccttccccggccctgccgcgctgttcggcccgtcctcctcggtccttccatccactcacgcgaagcttccagcagaggcgacctccgcatcgagtctcggctgccgaggagtcgagtcatggaagtggtggcgtcggcgccggggaaggtgctcatcgcgggaggatacctcgtgctggagcgccccaacgccggcctagttctcagcaccaccgcccgcttctacgccgtcgtccgccccctccgcgacagcctcccagccgactcctggacctgggcatggacggacgtcaaagtgacttcccctcaactctcgcgggtggccacatataaattgtccctaaataaaacgacgctgcaattgacgtcttcaagggaatcgacaaacccttttgtggagcaggccatacaattctccgtagcagctgctaaagcgaccattattgataaggagaggaaggatgtggtagataagttactgctgcaaggtctgaacattacaattattggtcacaatgatttctattcttatagaaagcagattgaagcacgtggtctccctcttactccggaggtactgctttcattgcctccattctcttcaattacatttaactcagaggttgctaatggaacaatgactggagagaaatgtaaacctgaagtagccaaaactggacttgggtcatcagctgccatgaccacatcagttgttgcagctcttcttcactatcttggtgctgttaacctctcatgttcaggacaatcttctggcgacaatgcaagtggacgagaacttgacttggttcacgctattgcccaaagtgcacattgtttagcacaagggaaaattggcagtggttttgatgttagtgctgctgtctatgggagtcaacgctatgtaaggttttctccagaaatactctcctcggctcaggctataggtgggactgtcttgccagatgtagtatcagatgttctaacacaaaggtgggatcatgagaataaacagttttcattacctcctctgatgacccttctccttggggaacctgggaccggaggatcatctactccatcaatggttggatctgtgaaacggtggctgaagtctgaccctgagaaatccagagatacatggagtaaactggccattgccaattcaacgctggagaaccaactgaggatcttaaaaggactttctgaaaatcaccatgaagcatatgagtccatggtgaggtcctgtagtcgtctcacatatgggaagtgggcagaggtggctactaaccaacatcaagaattaattataagatcattgttggctgcaagggatgcttgccttgagataaggcttcacatgcgagagatgggcatagcagctggtgttccaattgagccagattcacaaacacggctactagatgccactatgaatatggagggtgttttactggctggagttccgggagctggtggcttcgatgcagtgttctcagttgttttgggggatgcaagtaatgctgtagcacatgcttggagctctgttggcgttctgccacttcctgttcgagaagactgccgtggtgtttcattggaagacgctgacccgagaacaagggaggtgtcagcagctgtatggtccatccaaattaactgattctactgttaatagttctgtttatgcatggtgtaccaatatcatttattaacgatgttcgcattgctgcagttacaattcatagagacaacatagtataaatagtagaagccgttacggattaaagccaaactagcaggctctatcttttataagtacaaaattgtgccgaatgctctatcttttataagtacaaaattgtgccgaatgct

SEQ ID NO: 4413 - DNA, 1905 bp, Zea mays
gtgatcgcccgagcgttactctgccgagccgttcggccggtccactcccgcgaagcttccagcagaggcgaccttcggatcgagtctcggccgccgaggagtcgaaggccatggaagtggtggcgtcggcgccggggaaggtgctcatcgcgggaggatacctcgtgctggagcgccccaacgccggcctagtcctcagcaccaccgcccgcttctacgccgtcgtccgccccctccgcgacagcctccccgccgacgcttgggcctgggcgtggacggatgtcaaagtgacttcccctcagctctcacgggaggccacatacaagctgtccctaacgaagtcggcgctgcaattgacatctgcgagggaatctacaaacccttttgtggagcaggccatacaattctcggtagcagctgctaaagcgaccattattgataaggagaggaaggatgtagtagataagttgctgctgcaaggtctgaacattacaattcttggatgcaatgatttctattcttatagaaagcagattgaagcacgcggtctccctcttactccagaggcactgctttcattgcctccattctcttcaatcacatttaactcagaggttgctaatggaacaatgactggagagaaatgtaaacctgaagtagccaaaactggacttgggtcatcagctgccatgaccacatcagttgttgcagctcttcttcactatcttggtgtcgttagcctctcatgtccaggacaatcttctggtgataatacaactagacgagaacttgacttggttcactctattgcccaaagtgcacattgtatagcacaggggaaaattggcagtggttttgatgttagtgctgctgtctatgggagtcaacgctatgtaaggttttctccagaaatactctcgtctcaggctacaggtgggactttcctcccagatgtagtatcagatattgttacacaaaggtgggatcatgagaataaacagttctcattacctcctctgatgacccttctccttggggaacctggaaccggaggatcatctactccatcaatggttggatctgtgaaacggtggcagaagtctgaccctgagaaatgcaaagatacatggagtaaactggcctttgccaattcagcgctggagaaccaactgcgaatcttaaaaggactttctgaaaatcaccgagaggcatatgagtcgtggacagaggtggctactaaccaacatcaagaattaattattaaatcattgttggctgcaagggatgcttgccttgagataaggcttcacatgcgagagatgggcatagcagccggtgttccgattgagccagattcacaaacacggctacttgacgccactatgaatatggagggtgttttacttgctggagttccgggagctggtggcttcgatgcagtattctcagtgactttgggggatgcaagtaatgctgtagcaaatgcttggagctctgctggcgttctgccacttctcgttcgagaagactgccgtggtgtctcattggaagatgctgacccaagaacaagggaggtatcggcagctgtatcgtccattcagattaattgattctactgttaatattttatttatgtattgtgccgaatgctaggaggtacgtggttaaaataagtgctgcacttgcagcaagttagcacgttgtttacaatgactgttcatgagtgtagaaaataaggaattcaatggatttccatggaattagtgcttgtagttgtagctatggaatgtacgtgagaaaatgtcaaggtatccaacaaactcatactgtaaaccttgtatttgtaacttttgcggtttgtatgataattcggcatgtgttaatgttcgaaaaaaaaaaaaaaaa

SEQ ID NO: 4414 - DNA, 1846 bp, Oryza sativa Japonica Group
gctcgcgatcctcctcggttcctccgcctccgtcagcgacctcggaaggcggcggcgcgcgtcgtcgtgctgctctccgccgcgcgccacccggccttcccgcagctccggatcgcgtccccccagctgagcatggaagtggtggcgtcggcgccggggaaggtgctcgtcgcgggaggctacctcgtgctggagcggcccaacgccggcctcgtcctcagcaccagcgcgcgcttctacgccatcgtccgcccgctccgcgacgagctcagccacgactcctgggcatgggcgtggacggatgtgaaagtgacctctcctcagctctcccgggaggccacctacaagctctccctgaagaaatcaacgctccagttgacgtcttcaagggaatctgcaaacccttttgtggagcaggcagtgcaattctcggtagcagctgctaaagtgactgtcactgacaaagaggggaaggaggcactggacaagttgcttttgcaaggtttgcacattacaattttgggctgcaatgatttctattcttatagaaaacagattgaagcacgtggccttcctctaactccagaggtattgctttcgttgcctccattctgttcaattacatttaattcagaagttgctaatggaacaatgactggagaaaattgcaaacctgaagttgccaaaactggacttgggtcatcagctgccatgaccacatcagtagttgcagctcttcttcactatcttggaactgttaacctttcatgtttgggccaatcttccggtggcaacgcagctggacgagatcttgacttgctgcatgctattgctcaaagtgcacattgtatagcacaaggaaaaattggcagtgggtttgatgttagtgctgctgtctatgggagtcaacgttacacaaggttttctccagaaatattatcctcggctcaggttacaggtgggcactgcatggcagatgtggtggcagatattgttacacagagttgggatcatgagaaggttaagttttccttgcctcctctaatgtcccttcttctaggggaacctggaactggaggatcatccactccatcaatggttggatctgtgaaacagtggcagaagtcagaccctcagaaatccaaggagacatggagtaaattggggattgctaattcagtgcttgagaaccaactgaggaacctaaacaaacttgctgaagatcactgggaagcctatgaatctgttttacgatcctgtagtcgtctcacgtgcagtaagtggacagaggtggctaccaatcaacatcaagaactaattgttagatcattactggccgcaagagatgctttccttgaaataaggcttcatatgcgagagatgggcatagcagctggtgttccaattgagccagaatcacaaactcaacttctggatgccactatgaatatggagggtgttctactagctggagttcctggggccggtggctttgatgcagttttctcagtgattttgggtgaagcaagtgatgctgtagccaaagcttggagctcagctggtgttctccctcttcttgttcgagaagatccccgaggtgtttcattggaagctggtgacccaagaacaagggaggtgtcaaccgctgtatcatcgatacaaataaactgataatgttgtttgaattccgttagatttattcatgatgtgtacgtttggtgtctctttcatgtagcactagccaaacatgatatgttgaagaggctacacgcggacatggttaaataagtgctgtgcacggagcaagatatcatgttgtgacagattgatatgatttagccatgtg

SEQ ID NO: 4415 - DNA, 4660 bp, Sorghum bicolor
atggcggcaggctggtcgtcatcttggatctgcgggggagaggacgacgacggcgggcggctcaccgtcgcgtccccgtgcgtgcagaggaccctcatagactgcgtcaatgtggtcctgctcgtcgcctacgtctccacgctggcggtggcggctgcctgcgtcaggcggaggcagcgcgctgcaactgcaacagcggcaagccggaggagcggtgctcctgggtctgggtgggttctgctcgtcgtctcctcgtgctgcgtggcggctgccgtggcgtacggtgtcaccggtctccaggacgcctccgacgtcagggcggcggttccttacttcgtcagggccctggtctggatcgcgctggcggcgtcgctgcacgtccggccgacgaggccggcgagggccgtggccgtgctctggtgggtgctcttctcgctgctggtcaccgcgtacaatgtggagatccttgccgggggccacggcctcgacctcgccgagacgatctcgtggccggtgagcctcctcctcctgctctgcgccctcggctccctgctgcggcggggccacggggacgcctccaacgacagcggcggcttgtcagagcctctgatcggcggcaaagacgacagagccgccgtgccaacctcggagctgtaccgtgctggcctgttcggccagctcgccttctcgtggctgaaccctctgctccgtgtcggccgctccaaggcgctggacctcggcgacatcccgctcatcgccgacgaggacaccgcgcaccacacgtcgcagaagttcgccgaggactggagccgccacgtgggtgacaaggccaggagccgccggagagtagtaggcagcaacagcctcgccctcgtcctgctcaagtgcttcctcggcgagatcctgctcaccggcttctacgccttgctgagaacgctgtccatagcggttgctccattgctgctcttcgcgttcgtgtggtacagcaaccaggaggagcgagacctccgggtcggcctggtccttgtcggctgcctgctgatcaccaagctcatcgagtcgctctcgcagcggcattggttctttacctcgaggaggaccgggatgcgtatccggtcagcgctgatggcggtcatcttccagaagcagctcaggctgtccagtcaagggaggaagaaccactccactggcgagatcgtcaactacattgcggtcgatgcgtaccggctgggcgacgccatcagctggctgcacatggggtggagctcgccacttcagctggtcttctcagtcgccacgctcttctgggcactcaagcttggggctcttccaggtctggtcccccttgtcatctttggcttcctcaacgtgccattcgcgaaaatgctgcaggggtaccaggccaagttcatggttgcccaggacgagaggctccggtccacgtcggagatacttaacagcatgaagatcatcaagctgcagtcatgggaagacaagtttcgccaaatgatcgagtcactcagggacggggagttcaaatggctcaaggagactcagatgaagaaggcctacggtgcagtcatgtactggatgtccccgacggtcgtctctgctgtgatgtacacagcgacggccatcatggggagtgctcccctgaatgctagcacactcttcaccgtcttggccaccctgagggtaatggctgagccagtgaggtttcttccagagatcctaacaatgatgatccagtacaaggtgtcattagatcgaatagagaagtttcttctcgaagacgagatcagagaggaggatgtgaaaagagtgccttcagataactctgatgtcagagttcaagtccaagatggaaatttcagctggaaggcaaccggagctgatttgtcactgaggaatgttaaccttcgcataaatagaggagagaaggtggccgtatgcggcccagttggctcagggaaatcttcgctcctgtatgcattacttggggagataccaagaatatcaggatcggttgcggtgtttggttcagtggcatatgtttcacagagctcgtggatacagagtgggactgttcgtgacaatatactctttgggaagcctttccacaaggaactgtatgataaggcaatcaaatcttgtgctctggacaaggatatcgaaaattttgatcatggagacctcacagagattggtcagagaggactgaacatgagtggtggtcagaagcaaaggattcagctggctcgagccgtctacaatgacgcagatgtttatctactggatgacccattcagtgcagttgatgcgcacaccgctgctgttcttttttatgaatgtgtaatgacagcacttgcagagaagaccgttgttcttgtgacccaccaggttgaatttctgaccgaaaccaatagaattctggtaatggaaggtggtcaagttagtcaacaagggaaatattcagaacttctaggatctgggacagcatttgagaagctggtttctgctcatgaggcttcgatcacagcattggatactagtgccagccaacagaaccaagatcaagggcaacaagcgtttgatgaatacatagtgccaagtgcactgcaggttataaggcaggccagcgacattgaagtcaccgcaaagggaccttcagcagcaatacagcttacagaggaggaagagaagggcattggcgacctgggatggaagccatacaaagactacataaatgtacccaaggcggctttccaattctctggcatgtgtacttctcaggtgctcttcacgtgcttccagatcgcatccacatattggttggcggtggctgttcagatggatagtgtcagtgctgcacttcttgttggggcatattctggactctctatcttcagctgctgcttcgcctactttagaagcctttttgcggctaatctgggtctcaaggcctccaaagcattctttggcgggctaatggattccgtattcaaggctcccatgtcattttttgactcaacaccagtaggaagaattttaacaagggcatcttcagatttaagcattctagacttcgacataccttactccatggcttttgtggcgacgggcgctattgaggttgttaccacagtcctggtcatgggtactgtaacttggcaagtcttggttgtagctatccctgttgcgatcaccatgatatatgttcagaggtactacgtttcctcagctagggagctagtaagaatcaatggaacgacaaaggcacctgtaatgaactatgcatcagaatcaattcttggtgtggtgacgatcagggcatttgcagcaactgagaggtttatccacagcaacatgcagctcatcgacactgatgcgacactgttcttccatactgttgcagcacaagagtgggtgctcataagagtagaggcactgcagtccttgacaataattacagcagcattgttccttgttctggttcctccaggagcaatttcaccaggctttgcaggactttgtctctcctatgctttgacgttgactgcagcacaagttttcttgacaaggttctattcctacttggaaaactacatcatctctgttgaacgaatcaaacagtatatgcacctcccagtggagccaccagccattataccagaaaatagacctccaacttcatggccacaggagggaaggatagacctgcaagatttaaagataagataccgtccaaacgcaccgctcgtcctcaaaggaatcacttgcaccttttctgctgggaacaagattggggttgtagggaggacaggaagtgggaaatcaacacttatcagctcattgttccgtctcgttgatccggcgggtgggaagatacttattgacaagttggatatttgctccattggccttaaggatctaaggactaaactaagtattatccctcaagaacctacacttttcaggggaaccgtgcgcaccaatttagatcccctcggcctgcattctgatcaagagatatgggaggccttggagaagtgtcaactaaagacagcaatcagcagcacctctgctcttcttgatacagttgtgagtgatgatggcgataactggagtgctggacagcgtcagctcttctgtcttggcagagttctcctccgcaggaacaaaattctagttctagatgaggcgacagcatccatcgactctgcaacggatgcaatcctgcagaaagtaatcaggcaacagttctcaagttgcacggttataaccatagctcacagggtaccaactgtgacagacagcgacagggtcatggtcctgtcctacgggaagctcctagaatatgaaacgccagccaagctgttggaagacaaacaatcagcatttgctaaacttgtggctgagtattgggcaaataccaagcgaaattcaacatgatctaccattgttgcaggacatgataaaagatatgatcagttcaatcaagatatcgaaagattcaagggttctcaaatcgaatctgtaacaatacaaggaatgcccgcatgattatttgattgatgtggttactggaagtaaataagaaatcaacagcaattcaattttggtagtggaagcaatttttggagtcagggtttgatgacat

SEQ ID NO: 4416 - DNA, 4434 bp, Zea mays
atggcaggctggtcgtcatcttggatctgcggggaagaggacggcgggcggctcaccctcaccgtcgcgtccaagtgcgtgcagaggacactcatagactgcgtcaatgtggtcctgttcatcgcgtacgtctgcacgctggctgccgcctgcgtcaggcggcggcagcgctctgcagatgcgagcagcgggaggagcggcgctcctagtaggtgggtgctgctcgtcgtctccacgtgctgcgtggcagctgccgtggcctactgtgtcacggctctccaagacgcctacgacatcaagacggcggttccttacttcgtcaggggcctggtctggatcgcgctggcggcctcgctgcacgcccagccgacgaggccggcgagggtcgtggccgtgctctggtgggtgctcttgtcgctgctggccaccgcgtacaattcggagatccttgccggggggcacagcctggacctcgcggagatgattgcgtggccggtgagcctcctcctgctgctctgcgccctcggctccctgctgccgcggggcgacgggcaccactaccgggacgcctccaacggcagcagcggcttgtcggagcctctgatcggcaatgacagaaccgtgccaacctcggagttgtaccgcgctggcctgttcggccagcttgccttctcgtggttgaaccctctgctccgtgtcggccgctccaaggcgctggacctcggcgacatcccgctcatcgccaccgacgacaccgcgcaccacacgtcgcagcagttcacggaggcctggagccgccacgtgagcgacaaagccaggagccgccggggcgtgggcagcaacagcctcgccctcgtcttgggcaagtgcttcctcagcgagatcctgctcaccggcttctacgccttcctgagaatgctgtccatagcagttgcccccctgctgctcttcgggttcgtgtggtacagcaaccaggaggaacgagacctccgggtcggcctgtcccttgtcggctgcctgctgctcgccaagctcgtggagtcgctgtcgcagcggcattggttcttcagctcgaggaggaccgggatgcgtatccggtcagcgctgatggcggtcatcttccagaagcagctcaggctgtccattcaggggaggaacaaccactccactggcgagattgtcaactacattgcggttgatgcgtaccggcttggcgacgccatcagctggctgcacatggggtggacctcgccacttcagctcgtctttgcagttgccacgctcttctgggcactcaagcttggggctcttcctggtctagtcccgctagtcatctttggtttcctcaacgtgccattcgcgaaaatgctgcaggggtaccaggccaagttcatggttgcacaggacgagaggctccggtccacgtcggagatactcaacagcatgaagatcatcaagctgcagtcgtgggaagacaagttccgcagcacgatcgagtcgctcagggacggcgagttcaaatggctgaggcagacccagatgaagaaggcctatggtgcagtcatgtactggatgtccccgacggtcgtctctgctgtcatgtacacagcaacggccatcatggggagtgctcccctgaatgctagcacgctcttcacggtcttggccaccctgagggtaatgtctgagccagtgaggatgcttccggaggtcctcacaatgatgatccagtacaaggtggcattagatcgaattgagaagttccttctcgaagacgagatcagagaggacgatgtgaaaagggtaccttcagatgactctggtgtcagagttcgagtccaagccggaaatttcagctggaaggcaagcggagctgatctgtcactgaggaatgttaaccttcgcgtgaaccgaggagagaaggtggccgtatgcggcccagttggctcagggaaatcttcactcctgtatgcattacttggggagataccaagattatcaggatcagttgaagtttttggttcagtagcatacgtttcacagagctcgtggatacagagtgggactgttcgtgacaacatactctttgggaagcctttcaacaaggaactgtatgataaggcgatcaaatcttgtgctctggacaaggatatcgaaaattttgaccatggagacctcacagagatcggtcagagaggactgaacatgagtggaggccagaagcaaaggattcagctggctcgagccgtctacagtgatgcagatgtttatctactggatgacccattcagtgcagttgatgcgcataccgctgcagtccttttctatgaatgtgtgatgacagcacttgcagagaagactgtcgtccttgtgacccaccaggttgaatttctgactgaaaccgataggattctggtaatggaaggtggtcaagttagtcaacaagggaaatattcagaactcctgggatctgggacagcatttgagaaactggtgtctgctcaccagtcttcgatcacagcattggataccagtgctagccaacagaaccaagttcaagggcaacaagagtctgatgaatacatagtgccaagtgcgcttcaggttataaggcaggccagcgacatcgacgtgaccgcaaagggcccttcagcagcaatacagcttacagaagaggaagagaagggcattggcgacctgggatggaagccatacaaagaatatataaatgtatccaagggggctttccaattctctggcatgtgtattgctcaagtgctcttcacgtgcttccagatcgcatccacatattggttggcagtggctgttcagatgggtaacgtcagtgctgcacttcttgttggggcatattctggactctctatcttcagctgcttctttgcctactttagaagctgttttgcggctattctgggtctcaaggcctccaaagcattctttggcgggctaatggactccgtattcaaggctcccatgtcattttttgactcaacaccagtgggaagaattttaacgagggcatcttcagatttgagcattctagacttcgacataccttactccatggcttttgtggcgacgggcggcattgaggttgttaccacagtactggtcatgggtactgtaacttggcaagtcctggttgtagcgatcccagttgctgtcaccatgatatatgttcagaggcactacgtttcctcagctagggagctagtaagactcaacggaacaacaaaggcacctgtaatgaactatgcatcagaatcaattctcggtgtggtgacgatcagggcatttgcagcaactgagaggtttatctacagcaacatgcagctcatcgacactgatgccacactgttcttccataccattgccgcacaagagtgggtactcataagagtagaggcactgcagtccttgacaataatcacagcagcattgttccttgttctggttcctccaggagcaatttctccgggctttgcaggactttgtctctcctatgctttgactttaacttcagcacaaatattcttgacaaggttctattcgtacttggaaaactacatcatctcggttgaacgaatcaagcagtatatgcacctcccagtggagccacctgccattataccagatagtagacctccaacttcgtggccgcaggagggaaggatagacctgcaagatttgaagataagataccgtccaaatgcgccgcttgtcctcaaaggaatcacttgcacttttgctgctgggaacaagattggggttgtagggaggacaggaagtggaaaatcaacacttatcagctcattgttccgtctcgttgatccggcgggtgggaggatacttattgacaagttggatatttgctccattggccttaaggatctaagaactaaactaagtattatccctcaagaacctacacttttcaggggaaccgtgcgcaacaatttggatccccttggccagcattctgatgaagagatatgggaggccttggagaagtgtcaactgaagacagcaatcagcaccacctctgctcttctggatacagttgtgagtgatgatggcgataactggagtgctggacagcgtcagctcttctgtcttggcagagttctcctacgcaggaacaaaattctagttctagacgaggcaacagcatccatcgactctgcaacagatgcaatcctgcagaaagtaatcaggcagcagttctcaagttgcacggttataaccatagctcacagggtaccaactgtgacagacagtgacaaggtcatggtcctgtcctacgggaagcttctagaatatgaaacaccagccaagctgttggaagacaaacaatcagcatttgctaaacttgtggctgagtattgggctaataccaagagaaattcaacatga

SEQ ID NO: 4417 - DNA, 4945 bp, Hordeum vulgare subsp. vulgare
ggtgcgccctgcccaggaataggcgacgcgtcggccgctgcatgcgatgccgggcgcagggacggccgataagctgggccatccggccatggcctttctcggctggtcgccctcgtggacttgcgggcgggaggacggcggcgggctcaccctcgcgtcgccgtgcgtgcagaggggtctggtcgactgcgtcaatggtgtgctcctcgtcgcctacgcctccgcgctgctcgcggcctgcgtcacggggcggtgggatgggcgggggagaagcggcggcgcatggcggcggtggggggtggccgcggtttccgcgtgctgcgtggccgtcgcggcgacgtacgccgtcgccgcgttcgggggctccgcggacgcggcggtcaccacggcttccgtcgtcagggcgctggtgtgggtggccgtggccgcctcgttgcacctccagccgacgaggccggcgagcgccgtggccgttctctggtggacgctcttctcgctgctgatcaccgcgtacaatgcggaggtccttgccatgggccacgtgctcgacgtcgcggaggctgtcgcgtgggcggtcaacttcctcctcctgctctgcgccctcggctcgctgctgctccggcggagccgtggccacaaggacgacgacggcctgtccgagcccttgattgacaaggcggtgcacgactcggagctctaccgggccggcctgttcagccagctcgccttctcgtggctgaaccctctgctccgcctcggccgcacaaaagcactagacctcgccgacatcccgctcatctcctccgaggactgcgcacggcaggcctcacgtaggttctccgaggcgtggagccgccaccggcaggacaaggcgcagagcgggagatccaacggcctcgccctcgtcctgtgcaagtgcttcctcacggagatcatgatcgccggcttctacgccttcatgagaacactggcgatagccatctcccctatattgctctttgccttcgtacggtacagctaccaagaagaagagagagatcgccgtgtcggcctgtcgctcgtcggctgcctcctcgtcatcaagctcgtcgagtcgctgtcgcagcggcattggttcttcgactccaggaggaccgggatgcgcatacggtccgcgctaatggcggccatcttccagaagcggctcaagctgtccagccaggggaggaagaaccattccactggggagattgtcaactacattgccgtcgacgcttaccggctcggcgatgctctcagctggtttcacatggcgtggagctcgccgctccagctcgccttcgcagtaggcacgctcttctgggcgctcaggcttggggccatcccgggtctagtccccctgatcatcttcggcttcctcaacatgccgttcgcaaagcttctgcaagggtaccaggccaagtttatggttgcacaggatgacaggctccggtccacgtccgaggtgctcaacagcatgaagatcatcaagctgcagtcatgggaggagaagttccgggccatggtcgagtccctcagagacgccgagttcatatggctgagggagacccagatgaagaaggcctatggcgccgtcatgtactggatgtccccgacggtcgtctcggcggtgatgttcaccgccacggcgatcctggggagtgcccccctgaatgccagtaccctcttcacggtcttggccaccctgagggtcatggctgagccggtgaggttccttcctgagatcctaacaatgatgatccagtacaaggtgtcgttggaccgtatcgagaaatttctcgtagaagaagagatcaaagagggtgccgagagggcgcctccacaaaactctgatatcagggttcatgtccaagatgcaaatttcagctggaatgcgagcgcggccgatttggcgctaaggaatattaaccttagcataaaccaaggagagaaggtggccgtctgcggcgcggttggctcgggaaaatcttcactcctttatgcgttacttagggagatacctagaacatcaggatcagttgacgtatttggatcactggcatatgtttcgcaaaactcatggatacagagtggcactgtccgcgacaatatactcttcggaaagcccttcgacaaggaactgtatgagaaggcaaccaaatcttgtgctttggacaaggacatagaaaatttcaatcatggagaccttacagagatcggtcagagagggctcaacatgagtggaggtcagaagcaaaggattcaacttgctagagctgtttatagcgatgcagatatctacctcctagacgaccctttcagcgcggtcgatgcacacactgctgcggttcttttctatgattgtgtgatgaccgcactttcaaagaagaccgttgttcttgtgacgcaccaagtggaatttctgactgaaactaacaggattctggtaatggaaggaggccaggttaagcaacaagggaaatatgcagacctgctggaatccgggacggcattcgagaagctagtttcggctcaccagtcctcaatcactgcactggataccaccagccaagaaaaccaagtccaagggcaacaagtgcttgatgacagtatcatgccgagcacattgctggcgacgcggcagcctagcgaaatcgaagtctcgacgaagggtccttcagtggcccagctcacagaagaggaggagaaggggatcggcaacctcggatggaagccatacaaagactacgtacaagtctccaagggcattttacctctctgtgggatgattacagctcaagtgcttttcacagtctttcaaatcatgtccacatattggctggccgtggctattcagatcaatgtcagtagttctcttctggttggggcttactccgggatcgccatcttcagctgctgcttcgcctacctcagaagcctgttcgctgctactctgggactcaaggcctccaaagcattctttacgggtctaatggactctgtattcaaggctcccatgtcattctttgattcgacgcccattggaagaatattgacaagggcttcatcagatttgagcattctggacttcgacataccttactccatggcttttgtggtgaccggcggtattgaggtggtcacgacagtgctggtcatgggtactgtaacctggcaggtcttgcttgtagcaatcccagtcgcaatatccatggtatatgttcagaggtactacgtggactcggccagagagctagtcagaattaatggtacgacaaaggcgcctgtcatgaactatgcatcggaatcgattcttggtgtggtgacaatcagggctttcgcggcaacagacaggttcatccacaacaacctgcaccttatagacaacgatgcgacaatgtttttccacacggttgccgcgcaggagtgggttcttataagagtggaagcactgcaaagcttgaccatattcacatcttcattgttcctcattttggttcctccaggagtaatttcaccaggctttgcgggtctttgcctctcctatgctttaagcctgaccgcggcacaagttttcctgacacggtactattcctacctagaaaactatatcatttcagtcgagagaatcaagcagtatatgcaccttccatcagagcctcccaccataataccagacagcaggcctccaatttcatggccacaggagggaagaatagacctgcaagatttgaagattaaataccgcccaaacacgccacttgttctcaaaggaatcacttgcaccttccctgctggaaacagaattggggttgtcgggaggacaggaagcgggaaatcaacacttatcagctcactcttccgtctcgttgatcctgtgggtgggaggatacttattgacaacttggatatctgctctattggtctcaaggatctaagaactaaactgagtattatcccccaagaacctacactttttagagggactgtgcgcaataatttggacccccttggtcagcattccgatgatgagatatgggaggccttggaaaagtgtcagctgaagagatcaattagcagcactgctgctcttctcgatacagtagtgagtgatgatggcgataactggagtgttgggcagcgccagctcttctgtctcggcagagttctcctccgtaggaacaaaattctagtgttagatgaagcaacagcgtccatcgactctgccactgatgcaatcctacaggctgtcatcaggcagcagttcactagttgcacagtgataaccattgctcacagggtccctactgtgacagacagtgacagggtcatggtactttcctatggtaaacttctagaatatgacacacccgcaaagctgttggaagacaaacaatcagcctttgctaaacttgtggcggagtattgggctaattgcaagcggaactcaacatgattctatcattgtgtcagggcatgataaacgagatgagcaattcaattaagagatttgaggtggggtgagctacgattattgtgagttacgagttgtgtggtcatgtggaaataaagaaggcatcgacaacaatgtaaagctggtcattgatcgcaattttttggagataaggttgatagggagaactagctcaagatgcattgagttgagtcctccaagacaagcatgtcagcagggatgttgagatccattgcatattggaataaaggatccacctttagcgtgagaaatggtacacttcatatgtaagttctactattgaataacaagcaaaaaaggaagtgtgagacaaaaaaaaatactatgtactttgtgttaaataaggttggttgtaccgcggtggaactgcgtgttgttaagaatgaagatagtgccaagaaccttttaggattttatgcagtgaagttatgc

SEQ ID NO: 4418 - DNA, 1684 bp, Zea mays; identical to SEQ ID NO: 1108

SEQ ID NO: 4419 - DNA, 1553 bp, Zea mays
aaagcaaagtctcctgcttccttccgtcttgctcctcgacccttcttccttccccaccaccgcgttccaatcaatcccaatcgcgacccagccagaggcgagcgcgagaaaatccccattccccaatccccacgccacagcctcccttccctccccgtctcctccaaattcaatcgtctccaagcgccaatccgccccgtctccaaatcccaggcaggcaggcagccaaccagccatggagtgcgagccggaggagctgcagttcctgggcgtcgtcggcatctaccgcttctccgcggagatcctccgaggcccgcaccgcccgctcttcgcgcgcatcgcggccgccttcgcgctgcccctctccgcgcttttcctcctgcacgtcgccatctcgcacgcgctcttcacccacatcgactccgacgacacggccctggacgcatcctccccgggcaccgacacgcagcgccgcctgctgtcccgcctcgcctccgactggctcgccctgctcctcttcaagtccgcctacctcctcgcgctcctcctgctctcgctcctctccgtcgccgcctccgtgttctccgtcgcctccgtctactccgccaagcgcgacgcgctcaccttcccgcgcgtgctctccgtcgtgccccgcgtctggcggaggctcgccgccacgttcctcgccgccttcgcgctcctcttcgcctaccacgccgtcgccgtgctcgtcttcgtcggcctcctcgtcgccgcggacaacggctccggcctcgcgggcctgctcgccttcctcgtcgccgtcgcctacctgctcggcctcgtctacctcggcgtcgtctggcacctcgccagcgtcgtctccgtgctcgaggaccacaagggcttcgccgccatgcgcaagagcaaggacctcatcagggggaagctcgtcaccgcgggtgctatcttcttcacgctcaacgtcgtcttcgccgccgtcgagctcggcttccgcgcctgggtcgtcaggggatccggcgccgcgtcgtcaaggctcttgctcggcctcatcatgctcgccgcgctctgctgcgtcgtcatgctcgcgctcgtcacgcagaccgtcgtctacctcgtgtgcaagagctaccaccacgagagcctcgacaaggccaacatctccgaccacctcgaggtctacctcggcgactacgtcccgctaaaggcgtccgacgtgcagatggagcagttccaggtctgactgtgaatcccatagcttctctgtctttatcactgctcgccaatccatcctctgatgccggaattctcctgttaccaccggcagccaggtaatctgtaattgtgtacgtacagcaggcagcaggtgatgaacatacttgcgttaagtaggaagaattgggaatttttgtcttgggggtacaagaataatggggatctgtacttcccttagtctcttcctcaaggacatggttccttcccttgtttacatgatttataaacaggagatgaatggaattgggcatgccgaatttacaaaaaaaaaaaaaaaa

SEQ ID NO: 4420 - DNA, 1498 bp, Hordeum vulgare subsp. vulgare
aggcgaacaaaagaatccaaaaatccccaaatccccccctccccttccacgcgtgctacgccctcaatccccaattccccacgcggccggcctcctcaccagctccccccagctccccccagctcggatctccgccgccagcagctccggcgtaagaggccatggagtgcgagcccgaggagctgcagttcctgggccccgtcggcatctaccgggagtcggtggccatcctgcgcgcacaccgcccgctctacgcccgcatcgccgccgccttcgtcctcccgctctccgcgctcttcctcgcccacatcgccatctcccacgccctcttctccaccatcgactccgacgactccgccctcgagtcctccgctcccgggaccgcctcccagcagcggatcctccagaggcttggcgccgactgggccgccctcgtcctcttcaaggccgcctacctcctcgcgctgctcctcttctcgctcctctccaccgccgccgccgtcttctccgtcgcctccgtctactccgccaagcacgacgcgctcaccttcccgcgggtgctctccgtcgtgccccgcgtctggcgccgcctcgcggccaccttcctcgccgccttcgcgctcctcttcgcctaccacctcgtcttcgtcgtcgtcttcatcgcgctcctcgtcgccaccgacaacggctccaccctcgccgggctcctcgccttcgtcgtcgccatcgcctacctggtcgggctcgtctacctcagcgtcgtctggcacctcgccagcgtcgtctcggtgctcgaggactacaaggggttccaggccatgcgcaagagcaaggcgctcatccaggggaagctctggaccgtcgtgttcatcttcgtcacgctcaacctcgtcttcgtcgtcgtggagttcgccttccgcgcctggatcgtccagggcgcgcgccacggtctcggcgcgggagggaggctgctcctgggcctcgtcatcctggctgcgctctgctcggtcgtcatggtggcgctcgtggtacagacggtggtgtacctggtgtgcaagagctaccaccacgagagcatcgacaagagcaacatctccgaccacctcgaggtctacctcggcgactacgtcccgctcaaggccagcgacgtgcagatgcagcacttcggcgacgaggtctgacccctcccaaagatcgacctgcttctctttgctctcttctctgtaataccactactagtctagtcacacaggaattggtacaattccattgctggtcatttatatacccaaaacaaaacgagatgggaaggaagctgaagagaagtaggatcatttgatcagcagtttctcagtaattatactcagctttgctatgacacgagggacagttggatgttgcttgtagtaatttgtaatggagggatgggagtacatgctagcttgatcgcttgtgtgtacactgaaacgaatgaggacatgttgtgttaattatggat

SEQ ID NO: 4421 - DNA, 1665 bp, Oryza sativa Japonica Group
ggtctctcccccaaattccaattccaatttcatcatcttcttcgtctacctccagctcgcctcgcttcccccaccaattgcttacgtacgactactcctccacgccccaaatccaaaattccccaatccgatctctcgcctaccaccaagctcatctcgtttcgttagctacctaccaaattaataagggtagctacagacagcgtagcggacgaggaatccaaatcaaatccaatcctcaatcgaagaaatggagtgcgagccggaggagctgcaattcctgggcatggtgggtatctacagggaggcggcgtccatcctgcgcgcccaccggccgctcttcgcccgcatcgccgccgccttcgtcctcccgctctccctcctcttcctcctccacatcgccatctcccacgccctcttctcccacatcgactccgacgactccgccctcgactccgccgccccgggcacccccgcccagcgccgcctcctccaccgcctcgccgacgactggctcgccctcctcctcttcaaggccgcctacctcctcgccctcctcctcttctccctcctctccaccgccgccgccgtcttctccgtcgcctccgtctactccgccaagcacgacgccctctccttccccagggtcctctccgtcgtcccccgcgtctggcgccgcctcgccgccaccttcctcgccgccttcctcctcctcttcgcctaccacctcctcttcgtcgccgtcttcgtcgccctcctcgtcgccgccgactccggatcgggcctcgccgcgctgctcgccttcctcctcgccctcgcctacatcgcgggcctcgtctacctcagcgtcgtctggcacctcgccagcgtcgtctccgtcctcgaggactacaagggattcgaggccatgcgcaagagcaaggcgctcatacagggcaagctctggaccgcctccgccatcttcttcgtcctcaacgtcgtcttcatcgtcgtcgaggtcgccttccgggcgtgggtggtgcgcggggccacccacggcctcggcgccggctcaaggctcctcctgggcctcgccatgctcgccgcgctctgcgctgtcgtgatgctggcgctcgtggtgcagacggtggtgtacctggtgtgcaagagctaccaccacgagagcatcgacaagagcaacctctccgaccacctcgaggtctacctcggcgagtacgtcccgctcaaggccagcgacgtccagatggagcaattcaacctctgatcatcaaccctccgctccatccgatccgatcgctgtgagttgcgcttggattatatctctgtaatcatcatatttttattctcatcaacacagatactcataccacaaaaacacagtttgggatggctcaaaatcaggctggatctcaattgggagaataacctgtcagctgtatttgtaccagtagacattagaggttgtgtattgcattttctgttttgatcgaattcaatcccaaaaagcaacaacaaagtatactagtgcaaattagaacaacaaaggctagctacgttgattcaacggtttcttagctgtgaaaacatgatcatgcattcatgctaagctttggataattcagtgcgctcctgtattactagtacactactatcatttgaaggtta

SEQ ID NO: 4422 - DNA, 2319 bp, Sorghum bicolor
agctatcgttgcaaaggcaaagcaagcgatccaaattctctccgtttttcttcagatctcgagttccgcgactagctttggatcccttctttcattcgagagagcgattctctggtggcaatggcgaagagcgagggtccggcgatcgggatcgatctcggcaccacctactcgtgcgtcggcgtgtggcagcacgaccgggtggagatcatcgccaacgaccagggcaaccgcaccacgccgtcctatgtcgccttcaccgacaccgagcggctcatcggcgacgccgccaagaaccaggtcgccatgaatcccaccaacaccgtcttcgatgccaagcggttgatcggcaggaggttctctgacccttcagttcagagtgacatgaagctgtggccattcaaggtcatcccaggccctggtgacaagcccatgattgtagtcaactacaagggtgaggagaagcagttcgctgctgaagagatctcctccatggtgctcatcaagatgagggagattgctgaagcctacctcggctctacgatcaagaacgcagtggtgaccgtgccggcctacttcaacgactcgcagaggcaggccaccaaggacgccggtgtcattgcgggcctcaatgtgatgcgtatcatcaacgagcccactgccgctgctattgcctacggtcttgacaagaaggccaccagtgctggcgagaagaacgtgctcatcttcgaccttggcggtggcacgtttgatgtgtcgctgctcaccatcgaggagggcatcttcgaggtgaaggccactgcgggtgacactcaccttggaggcgaggacttcgacaatcgcatggtgaaccacttcgtccaagagttcaagcgcaagcacaagaaggacctcagcggcaacccccgtgcactgcgccggctgcgcacggcgtgcgagcgcgccaagcgcacgctgtcatcgaccgcccagacgaccatcgagatcgactccctgttcgagggcatcgacttctactccacgatcaccagggctcgcttcgaggagctcaacatggacctgttccgcaagtgcatggaacctgtggagaagtgtctgcgcgacgccaagatggacaagagcagcgtgcacgacgtcgtgctcgtcggtggctccacccgcatccccaaggtgcagcagctgctgcaggacttcttcaacggcaaagagctgtgcaagagcatcaaccccgacgaggccgtggcctacggcgcggctgtccaggccgccatcctcagcggcgagggcaacgagaaggtgcaagacctgctcctgctcgacgtcacgccactgtcactcggtctggagactgcaggtggtgtcatgacggtgctcatcccgaggaacaccaccatcccgaccaagaaggagcaggtcttctccacgtactccgacaaccagccgggcgtcctgatccaggtgtacgagggtgagcgcgcgaggaccaaggacaacaacctcctcggcaagttcgagctctcgggcatccctcctgctccccgcggcgtgcctcagatcacggtcaccttcgacatcgacgccaacggcatcctcaacgtctctgccgaggacaagaccaccggccagaagaacaagatcacgatcaccaacgacaagggcaggcttagcaaggaggagattgagaagatggtgcaggaggctgagaagtacaaggctgaggacgaggaggtcaagaagaaggtggacgccaagaacacgctcgagaactacgcctacaacatgaggaacaccatcaaggatgacaagatcgcctccaagctcccggcagaggacaagaagaagattgaggacgccgtcgatagtgccatcagctggctggacagcaaccagctggctgaggtggacgagtttgaagacaagatgaaggagcttgaggggatctgcaaccccatcatcgcgaagatgtaccagggcgctggcgcgggcatgggcgatgctgctggcatggatgaggacgccccgtctggtgggagcggtgctggtcctaagatcgaggaggtcgattaagttgttttagtgtccgaggtttggtttggtgaagtacatctgaactctgaaggttcttcgtgacatggttagacgtggtgttgcagtactgtgataaaacttatcagaataagttttcgcttctaatttgttttcttaaatcatgtgttgatcagcctatgagttgttcatatcgttgcctttcgtgttgaacatttgttttcttgccatactaatgagattcatctgcacaaactgtacgaagagaatcaa

SEQ ID NO: 4423 - DNA, 2181 bp, Zea mays
caaaagcgaagcaagcaatccgaattctctgcgatttctctagatctcgaccacccctactagttttggttcctcctttcgttcgagagagcgtttctagtggcaatggcgaagagcgagggtccggcgatcgggatcgacctcggcaccacctactcgtgcgtcggcgtgtggcagcacgaccgggtggagatcatcgccaacgaccaggggaaccgcaccacgccgtcctatgtcggcttcaccgacaccgagcggctcatcggcgacgctgccaagaaccaggtcgccatgaaccccaccaacaccgtcttcgatgccaagcggttgatcggcaggaggttctctgacccgtcagtgcagagtgacatgaagctatggccgttcaaggtcatcccagggcctggtgacaaacccatgattgtagtcaactacaagggcgaggagaagcagtttgctgctgaggagatctcctccatggtcctcatcaagatgaaggagattgctgaagcctaccttggttccaccatcaagaacgcagtggtgacagtgccggcctatttcaacgactcgcagaggcaggccaccaaggacgccggtgtcattgcgggcctcaatgtgatgcgtatcatcaacgagcccactgctgctgctattgcctacggtcttgacaagaaggccaccagctccggcgagaagaacgtgctcatcttcgaccttggtggtggcacgtttgatgtgtcgctcctcaccatcgaggagggcatcttcgaggtgaaggccactgcgggcgacactcaccttggcggcgaggacttcgacaatcgcatggtgaaccacttcgtccaagagttcaagcgcaagaataagaaggacataagcggcaacccccgtgcactgcgccggctgcgcacggcgtgcgagcgcgccaagcgcacgctgtcatcgactgcccagacgaccattgagatcgactccctgttcgagggcatcgatttctactccacgatcaccagggctcgcttcgaggagctcaatatggacttgttccggaagtgcatggaacctgtggagaagtgcttgcgcgacgccaagatggacaagagcagcgtgcacgacgtcgtgctcgtcggtggctccacccgcatccccaaggtgcagcagctgctgcaggacttcttcaacggaaaggaattgtgcaagagcatcaaccccgacgaggctgtggcgtacggcgccgctgtccaggctgccatcctcagcggcgagggcaacgaaaaggtacaagatctgctcctgctcgacgtcacgccactgtctctcggcctggagactgcaggtggcgtcatgacggtgctgatcccgaggaacaccaccatcccgaccaagaaggagcaggtcttctccacgtactccgacaaccagccgggcgtcctgatccaggtgtacgagggtgagcgcgcgaggaccaaggacaacaacctcctcggcaagttcgaactctccggcatccctcctgctccccgcggcgtgccccagatcacggttaccttcgacatcgatgccaacggcatcctcaacgtctctgccgaggacaagaccaccggccagaagaacaagatcacgatcaccaacgacaagggccggcttagcaaggaggagatcgagaagatggtgcaggaggctgagaagtacaaggcagaggacgaggaggtcaagaagaaggtggacgccaagaacgcgctcgagaattatgcctacaacatgaggaacaccatcaaggacgacaagatcgcctccaagctccccgctgaggacaagaagaagatcgaagatgccgttgacggcgccatcagctggctggacagcaaccagctggctgaggtggaggagttcgaagacaagatgaaggagcttgaggggatctgcaaccccatcatcgcgaagatgtaccagggcgagggcgcgggcatgggcgctgctgctggcatggatgaggatgccccgtctggtgggagcggtgctggtcccaagatcgaggaggtggattaagttggttagtgttcgaggtttggtttggtgaggtgtgaagtgcctgaactctgatggttgtttgtgaggtgtggtcgcaatagctgcggcctgtggtgaacttctcagaaataaataagttttcgttcc

SEQ ID NO: 4424 - DNA, 2275 bp, Sorghum bicolor
gtctttcgtctgagaaaaaaaagggtttccagtttccacgaaccaatctctctgcaaccgcaactgcaaccagggtttcgaaggaaggactagttgttttccgttcgtagaagaggaagaggagatggcgaagggagaggggccggcgatcgggatcgacctgggcacgacgtactcgtgcgtcggcgtgtggcagcacgaccgcgtcgagatcatcgccaacgaccaggggaaccgcaccacgccgtcgtacgtcgccttcaccgacaccgagcggctcatcggcgatgccgccaagaaccaggtcgccatgaaccccaccaacaccgtcttcgacgcgaagcggttgattggtaggaggttctccgacccgtctgtgcaaagtgacatgaagctatggccattcaaggtcgtggctggcccagctgacaagccgatgatagtggtcaactacaagggcgaggagaagcagttctccgccgaggagatctcctccatggtgctgaccaagatgaaggagatcgccgaggcctacctcggctccaccatcaagaacgccgtggtcacggtgcctgcctatttcaacgactcccagaggcaggccaccaaggacgccggcgtcatctccgggctcaacgtgatgcgtatcatcaacgagcccaccgcagctgccattgcctacgggctcgacaagaaggccaccagcagtggcgagaagaacgtgctcatcttcgacctcggtggcggcaccttcgatgtgtcgctcctgaccatcgaggagggcatcttcgaggtgaaggcgaccgccggtgacacccatctgggcggggaggacttcgacaaccgcatggtcaaccacttcgtgcaggagttcaagcgcaagcacaagaaggacatcagcggcaacccgcgtgcgctgcggcgcctgcggacggcctgcgagcgtgccaagcgcacgctgtcgtccacggcgcagaccaccatcgagatcgactcgctgtacgagggcatcgacttctacaccaccatcacccgcgcccggttcgaggagctcaacatggacctcttccgcaagtgcatggagcccgtggagaagtgcctccgcgacgccaagatggacaagagcagcgtgcacgacgtcgtgctcgtgggcggctccacccgcatccccaaggtgcagcagctgctccaggacttcttcaacggcaaggagctctgcaagagcatcaaccccgacgaggccgtggcgtacggcgcggctgtacaggccgccatcctgagcggcgagggcaacgagaaggtgcaggacctgctcctgctcgacgtcaccccgctgtccctgggcctggagacggccggcggcgtgatgaccgtgctgatccctcgcaacaccaccataccgacgaagaaggagcaggtgttctccacctactccgacaaccagcccggggtgctgatccaggtgtacgagggagagcgcgccaggaccaaggacaacaacctcctcggcaagttcgagctgtccggcatcccgccggcgccccgcggcgtgccccagatcacggtgtgcttcgacatcgacgccaacggcatcctgaacgtgtcggcggaggacaagacgacggggcagaagaacaagatcaccatcaccaacgacaaggggcggctgagcaaggaggagatcgagaagatggtgcaggaggcggagaagtacaaggcggaggacgaggagcacaagaagaaggtggacgccaagaactcgctggagaactacgcctacaacatgcgcaacaccatcaaggacgacaagatcgcctccaagctgggcgcggacgacaagaagcgcatcgaggacgccatcgacggcgccatcagctggctcgacagcaaccagctcgcggaggcagacgaattcgaggataagatgaaggagctggagagcatctgcaaccccatcatcgccaagatgtaccagggcgccggcgcggacatgggcggcgccgcgggcatggacgaggacgcaccggccggcggcagcagcggtgctggccccaagatcgaggaggtcgattaagctggccctgcgcatcgaggggattgagatgcgtaatgcttccacctggctctttgttgccgatcgtgtcacttctcacttgcactcgtgtcgtcgtagaagttgaattagttgtttgggagcagcagactttaaggttgagggtggttaaaaactcaatgctgagctttactcagcctttgaatatgattatgcttcttt

SEQ ID NO: 4425 - DNA, 2375 bp, Zea mays
caatcccttcccgtgctccgcaaccgctgagtgagaagaagagatggccggcaagggcgatggcccggctatcggcatcgatctcggcacgacgtactcttgcgtcggcgtgtggcagcacgaccgcgtcgagatcattgccaacgaccagggtaaccgcaccacgccctcgtacgtcgccttcaccgactccgagcgcctcatcggagatgcggccaagaaccaggtcgccatgaaccccatcaacaccgtctttgatgccaagcgtctcatcggcaggaggttcagtgatgcgtctgtccagagtgatatcaagttgtggcccttcaaggtcatttctgggcctggtgagaagccaatgattgttgtccagcacaagggtgaggagaagcagtttgcagctgaagagatctcctctatggttcttatcaagatgcgtgagattgctgaagcttaccttggtagcacgatcaagaatgctgtggtcacagtccctgcctacttcaatgactcacagaggcaggccacaaaggatgctggggtgattgctggccttaatgtgctgcgtatcatcaacgagccaacagctgcagctatcgcctatggtcttgacaagaaggctaccagtgtcggtgagaagaatgtcctcatctttgatcttggaggtggtacctttgatgtctccctcctcaccattgaggaaggaatctttgaggtcaaggccacagctggtgacacccatcttggtggtgaggactttgacaacaggatggtcaaccacttcgtccaggagttcaagaggaagaacaagaaggatatcactggcaaccccagggctctccggaggctgaggaccgcttgtgagagggcgaagaggactctgtcttccactgcccagaccacgattgagattgactcgctgtatgagggcatcgacttctactccaccatcacccgtgccaggtttgaggagctcaacatggacctgttcaggaagtgcatggagcctgttgagaagtgcctgagggatgccaagatggacaagagcaccgtccatgacgttgtacttgttggtggctccactaggatccccagggtgcagcaactgctccaggacttcttcaacggcaaggagctgtgcaagaacatcaaccccgatgaggctgtcgcctatggtgctgctgtccaggctgccatcctgagcggtgagggcaatgagaaggtgcaggacctgcttctgctggacgtcacccctctgtccctgggtctggagactgctggaggagttatgacagtgctgatcccgaggaacaccaccatccccaccaagaaggagcaggtattctccacctactcggacaaccagcccggtgtcctgatccaggtctacgagggtgagaggacccggacacgcgacaacaacctgctgggcaagttcgagctctccggcatcccccctgcaccccgtggtgtgccacagatcaccgtgtgctttgacatcgacgccaacggcatcctgaacgtgtctgccgaggacaagacaacggggcagaagaacaagatcacaatcaccaacgacaagggccgtctctccaaggaggagatcgagaagatggttcaggacgctgagaagtacaagtctgaggatgaggagcacaagaagaaggtggaggccaagaactcgctggagaactactcctacaacatgcgcaacacgatcaaggacgagaagattgcgtccaagctgccggccgatgacaagaagaagatcgaggacgccatcgacgcggccatcagctggctggacgccaaccagctcgccgaggcggacgagttcgaggacaagatgaaggagctggagagcctctgcaaccccatcatcgccaagatgtaccagggcgcgggtgaagacatgggcggcgctggcggcatggacgaggacgcccctgccggcagcggcggccctggccccaagatcgaggaggtggactaagcggtttgttgtcagtcttgagtgtgctgcagttgctggctggcccagttgctgccgagagttatcgtcagttggtgcggtgtgtccgcttaaactttatttgtggttggttggtacttttgtggtggttatttttttggacctcgtgatagtcggtcggttcaatgttatcgcggctactggcaaaccttaagtgatacggtattcttcttttcggtatttgtttctgcatactgctggctcgtattttgtttttgagcttgcgattctttgttaatttcaaccttttgccagttaggaggccattctcatttgattgtttaccacaatttttaggctgtcatgttatgtggcatttaatgaaattcataaactcccaccc

SEQ ID NO: 4426 - DNA, 2379 bp, Oryza sativa Japonica Group
ctctcccactcttcctcctccccaaaccctagccgccgccgccggcgtactcgagagaaacatcagcatccatggcgggcaagggcgagggtccggccatcggcatcgaccttggcacgacctactcgtgcgtgggcgtttggcagcacgaccgcgtggagatcatcgccaacgaccagggcaaccgcaccaccccctcctacgtcggcttcaccgactccgagaggctcatcggagatgctgccaagaaccaggtcgccatgaaccccatcaacaccgtctttgatgccaagcgtctcattggcaggaggtttagcgatgcttctgttcagagtgacattaagctctggcccttcaaggtgattgctggacctggtgacaagcctatgattgttgtccagtacaagggtgaggagaagcagtttgctgcagaagagatctcctccatggtcctcatcaagatgcgtgagattgctgaggcctaccttggcaccaccatcaagaatgccgttgtcactgttcctgcctacttcaatgactcccagaggcaggccaccaaggatgctggagtgattgctggtctcaatgtcatgcgtatcatcaacgagccgactgctgcagctattgcctatggtcttgataagaaggccaccagcgttggtgagaagaatgtcctcatctttgaccttggaggtggtacctttgatgtctccctccttaccattgaggagggtatctttgaggtcaaggccacagctggtgacacccatcttggtggtgaagattttgacaatcgtatggtcaaccactttgtgcaagaattcaagaggaagaacaagaaggatatcactggcaaccccagggctctcaggaggttgaggacagcttgtgagagggcaaagaggaccctgtcctccactgcccagaccaccattgagatcgattccctgtatgagggcatcgacttctactcaaccatcacccgtgccaggtttgaggagctcaacatggatctcttcaggaagtgtatggagcctgtggagaagtgcctcagggatgctaagatggacaagagctctgttcatgatgttgtccttgttggtggctccactaggatcccgagggtgcagcagctcctgcaggatttcttcaacggcaaggagctttgcaagaacatcaacccagatgaggctgttgcttatggtgctgctgtccaggctgccatcttgagtggtgagggcaacgagaaggtccaggacctcctcctgttggatgttacccctctctctctcggtttggagactgctggtggtgtcatgaccgttttgatcccaaggaacaccaccattcccaccaagaaggagcaggtcttctccacctactccgacaaccagcctggtgtgctcatccaggtttatgagggtgagaggaccaggacacgtgacaacaacctgctggggaagtttgagctctctggaatccctcctgctcccaggggtgttccacagatcactgtttgcttcgacattgatgccaatggtatcctgaacgtgtctgctgaggacaagaccaccgggcagaagaacaagatcaccattaccaacgacaagggcaggcttagcaaggaggagattgagaagatggtccaggaggccgagaagtacaagtcagaggatgaggagcacaagaagaaggtggagtccaagaacgcgctggagaactacgcctacaacatgcgcaacaccatcaaggatgagaagatcgcctcgaagctcccggcagcggacaagaagaagatcgaggatgccatcgaccaggccatccagtggctggacggcaaccagctcgctgaggctgatgagttcgatgacaagatgaaggagctggagggcatctgcaaccccatcatcgccaagatgtaccagggcgctggcgcggacatggccggcggcatggacgaggacgatgctcccccggctggcggcagcggtgctggccccaagatcgaggaggtcgactaagcgcgaaatttgctagtgatccgcgcttcaagttatcttattgcattattagtgtctcttttatgttgtgttaaaaaactttgctgctatgacttatgatgatacccttggtctgtttgggcagtccttttgaattgaagaactgcgttgggagctctatgagaactatgaattgcgtgagaaatttaattattgtggtgcttgcagcgcctattatttggtctctgtcccacgtttattatttgcatgtgcgcattgtttgctagcaattgctgttgtgcttctcagccaacatgtaaactgtttggattgtttctgatttttggatgcattttttaaagcggatagtgaaggacgg

SEQ ID NO: 4427 - DNA, 3208 bp, Nicotiana tabacum
ggatccagttacaaaagaacattctagaaccaataagcccagcccattaaatactcctctcctttcccctccccctctcatcaaaccctaacacaattctttattcccttgctttctctccgccgtcttcatattctcttttttgctttctcgtttttgcgttggtgtatagtgaagaaagctaagtaatggccggaaaaggagaaggtccggcgatcggaatcgatctcggaacaacttactcttgtgtcggtgtatggcaacatgatcgtgttgagattattgctaatgatcaagggaacaggacgacgccgtcttatgttggatttactgattctgaacgtctcattggtgatgccgctaagaatcaagtcgccatgaatcctattaacactgtttttggtaagttttaagctctgatctgttgtttagatcttaattttttgtggtttgtgatttagctgtttgttgttgattaatagtagagctattgttaattctagattgaatgttgagctattgcataatgacctcgtttctgttaatagtagtgttaatgtatgtagtaattgttttggtaaatagtgttaatacgtattatatctcgtttgatgaaggtaattcttctagaattgtgtttgttatgaattatttctaaacaattgttgatttaggactttgagccagttgtagcgaagatactactggcacaactatcgtctatctatataagagttaatctacatgtttagttgaatgccgtcgtgctccatgtcttaattcatatgccaatggtttattcgtaatttcatgttcatgtttgctaggcataggcatattaacaaaggcaaattgaggatttaagcttcatggtttaaacctcaagtttcttagcgttgaacctgttatatttttaaagctaggtagtttatacctactacttattgcaatcaaatctaatttcctcggtgtcacggcaccttcatcctgcatcctcccctggccatataggttgttcctccaaaatatctgaccattaatatggattttttgaactgctaccggtttaatattcatgaatatctctgctgtcattggttcttaaagttatcctgaatttgatggtcttttgctgttatgttacgttttgtgctatagttgccgttcatgcatagtctgtggttttgggggggggggatttaacttttgatataaatagttttgaagtaaagattgcatgtgattgaatcagtgcttactatgtttttacaatggcagatgccaagaggcttattggaaggaggtttagtgatgcctctgtacagagtgacatcaaattgtggcctttcaaggttatttccggacctggtgacaagccaatgattgtagtcaactacaagggtgaagagaagcagtttgctgctgaagaaatctcttccatggtgcttataaagatgaaggaaattgccgaggccttccttggatcaactgtgaaaaatgctgtggttactgtacctgcatacttcaatgactcacaacgtcaggctactaaggatgctggtgtcatatctggcttgaatgtcatgcgtattattaatgagcctacagcagctgccattgcttacggtcttgacaagaaagccactagtgtcggtgagaagaacgttcttatctttgatctaggtggtggtactttcgatgtgtccctccttactattgaagaaggcatttttgaggtgaaagccacagcaggagacactcaccttggaggtgaagattttgataacagaatggtgaaccactttgtccaggagttcaaaagaaagcacaagaaggacattaccggtaacccaagagcccttagaagattgagaacagcatgtgagagggcgaagagaactctttcttccactgcccagacaacaattgaaattgattccttgtatgagggagttgacttctattccaccattactcgtgccagatttgaggagttgaacatggatcttttcaggaagtgtatggagcccgttgagaaatgtttgagggatgccaagatggacaagagcactgtacatgatgttgttcttgttggtggatccactagaattcccaaggtacaacagctgttgcaagacttctttaatggtaaggagctttgcaaaagcatcaacccagatgaggctgttgcctatggtgctgcagtgcaagctgccattctaagtggagagggtaatgagaaggttcaagacttgttgcttctggatgtcacccctctatctcttgggttggaaactgctggaggagtgatgactgtcttgattccaaggaataccactattcctaccaagaaagagcaggtgttctctacatattctgacaaccaacctggagtgttgattcaggtgtatgagggtgagagagcaagaactagagacaacaacttgctgggtaaatttgagctttctggtatccctcctgcacctaggggtgtgccacagatcacagtctgctttgatattgatgccaatggtatcttgaacgtctctgctgaagacaagaccactggacagaagaacaagatcacaattaccaatgacaagggtaggttgtcaaaggaagaaattgaaaagatggtccaggaagcagagaagtacaaggctgaagatgaggaacacaagaagaaggtagaggccaagaacgcactggagaactatgcctacaacatgaggaacaccataaaggacgagaagattggttctaagctaagctcagatgacaagaaaaagatagaggatgctattgaccaggcaatttcatggcttgacagcaaccagcttgctgaagctgatgagtttgaagataagatgaaggagctcgagagcatctgcaatcccatcattgctaagatgtaccaaggtgctggtggtgaagccggtgcacctatggatgatgatgctcctccagctggtggtagcagtgcagggcccaagattgaggaggtcgactaagtgtacggacacccttggaaacaagggcttttttaactttcaactagactttgtcttttatggtgtgttaaaccccttaatggtttccggaatactcaacgtagaagtttaagcaaactgaaaacgacggtgtgaaaaaaaaaaaaaaagagggatggaagtaatataagattaactcaaatggaatggaacagcgt

SEQ ID NO: 4428 - DNA, 2311 bp, Triticum aestivum
tcgaaatcagagaggggcaaagcaaatcgcaccaggcaaactcagagggtcttccggcgaaccccaaagcgagagagcgagcgagcgattcccaggagaggagaggaggcggagatggccaagggcgaggggccggcgatcggcatcgacctcgggacgacctactcgtgcgtcggcgtctggcagcatgaccgggtcgagatcatcgccaacgaccagggcaaccgcaccacgccctcctacgtcgccttcaccgacaccgagcgcctcatcggcgacgccgccaagaaccaggtcgccatgaaccccaccaacaccgtcttcgatgcgaagcggctgattggcaggaggttctctgacccctccgtgcagagtgacatgaagctgtggcccttcaaggtcatccctggccctgcagacaagcccatgatcgtcgtcaactacaagggtgaggagaagcagttcgcagcggaggagatctcctccatggtgcttatcaagatgagggagatcgctgaggccttcctcggcaactctgtcaagaacgccgtggtcaccgttccggcctacttcaacgactcccagcgccaggccactaaggacgccggcgccatcgccgggctgaacgtgctgcgcatcatcaacgagcccactgctgctgccatcgcctacggccttgacaagaaggcgaccagcaccggtgagaagaacgtcctcatcttcgaccttggcggtggcactttcgatgtgtcgctgctgaccatcgaggagggcatcttcgaggtgaaggccaccgccggtgacactcacctgggtggggaggacttcgacaaccgcatggtgaaccacttcgtccaggagttcaagcgcaagcacaagaaggacatcaccggcaacccccgcgctcttcgtcgtctccgcacggcgtgcgagcgtgccaagcgcacgctgtcgtcgacggcccaaaccaccatcgagatcgactcgctgtacgagggtgtggacttctacactaccatcacacgggctcgctttgaggagctcaacatggacctcttccgcaagtgcatggagccggtggagaagtgcctccgcgacgccaagatggacaagagcacggtgcacgacgtggtgctggtcggtggctccacccgtatccccaaggtgcagcagttgctccaggacttcttcaacggcaaggagctgtgcaagagcatcaaccccgacgaggcagtggcgtatggcgcctccgtccaggctgccatcctgagcggagagggcaacgagaaggtgcaggacctgctgctgctcgacgtgacgcctctctccctgggtctggagaccgccggcggcgtcatgacgacgctcatcccgaggaacaccaccatccccaccaagaaggagcaggtcttctccacctactcggacaaccagccgggcgtcctgatccaggtgtacgagggcgagcgcgccaggaccaaggacaacaacctcctgggcaagttcgagctctccggcatcccgccggcgccccgcggtgtgccccagatcacggtgtgcttcgacatcgacgccaacggcatcctgaacgtgtctgcggaggacaagacgacggggcagaagaacaagatcaccatcaccaacgacaaggggcggctgagcaaggaggagattgagaagatggtgcaggaggcggagaggtacaaggcggaggacgaggagcacaagaagaaggtggacgccaagaacgcgctggagaactacgcctacaacatgcgcaacacggtcaaggacgacaagatcgcctccaagctcggcgcggacgacaagaagaaggtggaggaggcgatcgagggcaccatcagctggctggacgccaaccagctcgccgaggccgacgagttcgaggacaagatgaaggagctggagggcatctgcaaccccatcatcgccaagatgtaccagggcgccgcgccggacatgggcggcggcatgggcatggacgaggacatgccggccggcggcggcggcgctggccccaagatcgaggaggtggactaatttgttggtccgtgcccgtggtggtctccggtctgcgcgctacttgatgggttcgctgtctcggtgtccgtcctttggatgccgctcggtggtgtcagtcgtctgtcgttgtgtcatctagctggaagtagtagtagtcgttcgatggagtcgttggtctgaaggacatgatggatcatgatgtttgctttggtttggaacccttgaagcttagagcttctcgtttttaagtttgaatttggtgcttccc

SEQ ID NO: 4429 - DNA, 2298 bp, Hordeum vulgare subsp. vulgare
ggtccgttcgaaatcaaaatcagagagagagcgaagcaaatcgcaccaggcaagcacagagagcgccgttcccatcctccagcgaaccccaaagccagccagcgagcgagagattcgtcgtagagaagatggccaagggcgagggtccggcgatcggcatcgacctcggcacgacctactcctgcgtcggcgtgtggcagcatgaccgggtcgagatcatcgccaacgaccagggcaaccgcaccacgccctcctacgtcgccttcaccgacaccgagcgcctcatcggcgacgccgccaagaaccaggtcgccatgaaccccaccaacaccgtcttcgatgcgaagcggctgattggcaggaggttctctgacccgtccgtgcagagtgacatgaagctgtggcccttcaaggtcatccctggccctgccgacaagcccatgatcatcgtcaactacaagggcgaggagaagcagtttgccgcggaggagatctcctccatggtgctcatcaagatgagggagatcgccgaggccttcctcggcaactccgtcaagaacgccgtggtcaccgtcccagcctacttcaacgactcccagcgccaggctaccaaggacgccggtgccatcgctgggctgaacgtgctgcgcatcatcaacgagcccactgctgctgccatcgcctacgggcttgacaagaaggcgaccagcactggcgagaagaacgtgctcatcttcgaccttggtggtggcaccttcgatgtgtcgctcctgaccatcgaggagggcatcttcgaggtgaaggccaccgctggtgacactcacctgggtggagaggacttcgacaaccgcatggtgaaccacttcgtccaggagttcaagcgcaagcacaagaaggacatcagcggcaacccgcgctccctccgtcggctccgtactgcctgtgagcgtgccaagcgcacgctgtcgtccacagcccagaccactatcgagatcgactcgctgtacgagggcgtcgacttctacaccaccatcacccgggctcgcttcgaggagctcaacatggacctcttccgcaagtgcatggagccggtggagaagtgccttcgcgacgccaagatggacaagagcaccgtgcacgacgtggtgctggtcggcggctccacccgtatacccaaggtgcagcagctgctccaggacttcttcaacggcaaggagctgtgcaagagcatcaaccccgacgaggccgtggcgtacggcgccgccgtccaggccgccatcctgagcggcgagggcaacgagaaggtgcaggacctgctgctgctggacgttacgccgctgtccctgggcctggagacggccggcggcgtcatgacgacgctcatcccgaggaacaccaccatccccaccaagaaggagcaggtcttctccacctactcggacaaccagccgggcgtcctgatccaggtgtacgagggcgagcgcgccaggaccaaggacaacaacctcctgggcaagttcgagctgtccggcatccccccggcgccccgcggcgtgccccagatcacggtgtgcttcgacatcgacgccaacggcatcctgaacgtgtcggcggaggacaagacgacggggcagaagaacaagatcaccatcaccaacgataaggggcggctgagcaaggaggagatcgagaagatggtgcaggaggcggagaggtacaaggcggaggacgaggagcacaagaagaaggtggacgccaagaacgcgctggagaactacgcctacaacatgcgcaacacggtcaaggacgagaagatcgcctccaagctcggggcggacgacaagaagaaggtggaggacgcggtcgagggcaccatcagctggctggacggcaaccaactcgccgaggccgaggagttcgaggacaagatgaaggagctggagggcatctgcaaccccatcatcgccaagatgtaccagggcgccgcgccggacatgggcgggggcatgggcatggacgaggacatgcccgccggtggcggcggcgccggccccaagatagaggaggttgactaagctgttgctccatggtggccttccttcggtctgcgcgcaacttgatgggtgttctgtttcggtgtcctttggatgctgctcggtggtgtcagtcgtttgtcgtcgtgtcatgtagcaggaagtagtaatagtggttggatggagttgttttgtctgaggacatgatggatcataatgtttgcttgttggtttggaaccgttgaagtttagagcttatcgtttg

SEQ ID NO: 4430 - DNA, 1804 bp, Sorghum bicolor
atgacgttactggaggagttgttccgggcgatagagctctggcttcggattgcaaaggagcaggtgcccttggtcgatcccacccttgacccagtgttacttgttcctggtattgctggctccatccttgaagctgtcgatgaggaaggaaacaaggagagagtttgggtgcgcatccttgctgctgagcatgagttcagagagaagctctggtccaaattcgatgcctccactggtaaaactgtttctgttaacgagaaaacaagaattactgtccctgaggacagatatggtttgtacgccattgacacattagacccagacctgatcattggtgatgacactgtgtactactatcatgacatgatagtggaaatgattaagtggggatatcaagaaggaaaaactctctttggatttggttacgatttccgtcaaagcaataggctctcagagacacttgacagattttccaaaaagctggagtcagtgtacacatcttctggtggaaaaaagatcaatctcattacccattccatggggggattacttgtgaaatgtttcatctctctgcacagtgatgtatttgaaaaatatgtgaagagttggatcgcaattgctgcaccattccaaggtgcccctgggtacataactactagtctgctgaatggaatgtctttcgttgaaggatgggaatcaagattctttatttccaaatggtgtatgcagaaattgctacttgagtgcccatcaatctatgagttgctggcgaaccctaacttcaagtggaaagacaccccactgctacagatttggagagaaaatttggataacgatggcaagaaaagtgccctgttagagtcatatgagcctgaggaagcaattaagatgattgaaaaggctctttccagtaatgagatcattgctgatggcatgcatattccggtgccccttaatttggatatattgaattgggcaaaggaaacttatgatcttttaagcagtacaaagcttccggaatcagtgaaattctacaatatttatgggattgattatgatactccacatactgtctgctatggcagtgaaaagcatccggtttcaaatcttagtcacctcttatatgctcagggaaaatatgtctatgttgatggtgacgggtctgttcccacagaatcagcaaaggcagacggatttgatgcagtagcaagagttggtgttgctgctgaccaccggggaatcgtctgcagtcaccatgtgttccggatcgtccagcactggctgcacgcaggagaacctgacccgttctatgacccgctgaccgactacgttatactcccagcactctatgacatagagaagcattgtgagaaacatggggatgtcatgtcagttacggaggactgggagatcatctcccagagtgacggcaggaccacgaggccaggtgagcttcctcctatgatcagcacactgaccactagtcgggaaggcaaggagggcacactggaagaggcacaggccaccgtggtcgttcacccagagaaacaagggcggcagcatgtggaagttagggctgtgggtgtcagccatggtggctaagctggaggaaccacgttggttgtatatctagcagctaaaacctctgggcacgcactgtaaaattggatgtacatatggctgtgaccctaggaaatctgtgtttagaactataaatgttcatgaaaaacttgtaaaaatgtaaagaacaaaaaaacacaggtcctatttttttcttttaaaatagaaaatggtaaagtatttc

SEQ ID NO: 4431 - DNA, 2332 bp, Oryza sativa Japonica Group
atggctgccctgtcgtccacgcgaccgaagaagcaaggcaagccctagccgccactcccgatttgcttcccagcccttgcggctcctgcgattcgatttggcgggaaattgctcgcgctctcgctcgcgccatcggttcttgaatcggagggattgggagcgggggggaaggtttcttgctttgcagccgaatcttgactggtccagtttcgtgacttacctagtgcccattcttcccgtttgagatttagaagcaagctttggatgaaaagcatcatctttagcttctttgatttgttgggtgaagggggctctcaattctttcgagccattgctgctcattcgagagctatcctttcaccggttggattggaggagctagtccataaatttgtataggaatctgaggaaagggcgctctttacggtgcccatggctgtgctggaggatttgatcagggcgattgagctctggctgcggattgctaaggagcaggtacccttggtggatccaacccttgacccggttctgcttgtccccggcataggcggctcgattcttgaagccgttgatgaggccgggaagaaggagagggtgtgggtgcgcatcctcgctgcggatcatgagtttcgagcacatctctggtccaagtttgatgcttccactgggaaaactgtctctgtcgatgagaaaacaaatattgttgtccctgaggatagatatggactatacgctattgacactctggaccccgacatgatcattggcgatgatagtgtttgctactatcacgacatgatagtgcaaatgatcaaatggggataccaagaggggaaaacattatttggatttggttatgatttccgccagagtaacaggctttcagaaacacttgatagattttccagaaagttggagtcagtttacatagcttccggagaaaaaaagatcaatctcattactcattcaatgggaggattgcttgtcaaatgcttcatgtccctccatagtgatgtcttcgagaaatacataaagagttggattgcaattgctgcaccatttcaaggtgcacctgggtacataactactagtctgctgaatggtatgtcttttgtcgaaggatgggagtcaagattctttatttccaagtggagtatgcagcaattgttgctcgaatgcccatcaatttacgaattgttggctaactcgaccttccaatgggaagatactccatatctgcagatctggagacagaaattggatactaatggcaagaaaagtgccatgttagagtcatatgagccagatgaagcaataaaaatgattagagaagctctttccaagcatgagatcatttctgatggtatgcacattccattgccccttgatatggatatattgagatgggcaaaagagacacaggatgttttgtgcaatgcaaagcttccaaaatcagtgaagttctacaatatttacggaactgattatgacactgcccataccgttcgctacgggagtgaacaccatccaatttcaaatctcagtgacctcttgtatactcagggcaactacatctgtgttgatggtgatggatctgtccctgtagaatcagcaaaggcagatggcctcgatgcagtggcaagagttggggttgctgcagaccaccgaggaatcgtctgtgatcgtcacgtgttccggataattcagcactggctccatgccggtgagcctgacccattctacgatcccctcaacgactacgtcatactcccaacagccttcgagatcgagaagtaccacgagaaacacggggatatcacatcggttagagaggactgggagatcatctcccatcgcgatgacgaaagcaagaggccagccgagcttcctcctatgttcaacacgctatcggcgtcccgcgagggtgaagacggctcgctggaagaggcgcaggcgacgatctttgttcatccagagagcaaagggaggcagcatgtggaagttagggcagttggagtcacccatgacggctagtcaagccagtcatacgaaaacacacggttgtcaactagctagtctgcacactccaaagcaaagtggacaatgtaaatataagacgtccctagctatgaactacgtgtaattttgctgccttgtaaataccagaactgaaaatatactgccactggatgatgatacgaatagaaaggagaaagaaaaggatgaacttgatatgttaaaattgtatcaggtgcttgaaatgttgttactggaaactgatcatcctgactcggttgatcaagcgatgagacctccgagttatcattgtctt

SEQ ID NO: 4432 - DNA, 2006 bp, Zea mays
cgacatcgaggatgggggtcgtgcgcccgtgccgacggggatgggacgcgaggaggatgggagcgggggcaccagagacatccgcgggcacgcgtgcatctagacgcggggcgaggtagggtgtgtacactgggcgggaaggggatgaaatggtggcgggggctcaggcgccattggtggcgcactgtttagaaatcaagagcggcaccttccatgactactccagaaatctgatggcggatagagcagcggagcagtgattccgcgagtgattccgcgagagcagcggagcgcgagagcaacggcgtggctggaggaggagattacggacgcaacggcgcggggcaggaggagagcgcggacgcaacgacgcggggccaggagacggagattgcggacggttcggtgaggtgggaagcgacgtccgcgattcttggcaccagagaggatgcggcggcgcggatcgtggtgtatccatccatggaagcacggcgcgaggggcagatcggcgtagggaggctgcgatctcgggaaccttccaagctgggatcgagagatcattggcgatgacactgtgtactactatcatgacatgatagtggaaatgattaaatggggatatcaagaaggaaaaactctctttggatttggttatgatttccgtcaaagcaacaggctctcagagacacttgacagattttccaaaaagctggagtcagtgtacacagcttctggtggaaaaaagatcaatctcattactcattcaatggggggattacttgtgaagtgtttcatctctctgcacagtgatacatttgaaaaatatgtcaagagttggatcgcaattgctgcaccattccaaggtgcccctgggtacataactactagtctgctcaatggaatgtcttttgtcgaaggatgggaatcaagattctttatttccaaatggtgtatgcagcaattgctacttgagtgcccatcaatctatgagttgctggcaaaccctaacttccagtggaaagacatcccactgctacagatttggagagagaatttggataacagtggcaagaaaagtgccctgttagagtcgtatgagcctgaggaagcaataatgatgattaaagaggctctttccagtaatgagatcattgctgatggcatgcatattccggtgccccttaatttggatatattgaattgggcaaaggaaacttatgatcttttatgcagtacaaagcttccggaatcagtgaaattctacaacatttatgggattgattatgatactccacatactgtctgctatggcagtgaacggcatccggtttcaagtcttagtagcctcttatatgctcagggaaaatacgtctatgttgatggcgacggatctgttcccgcagaatcagcaaaggctgacggatttaatgcagtggcaagggttggggtggctgctgaccaccggggaatcgtgtgcagtcgccgcgtgttccggatcgttcagcactggctgcacgctggagaacctgacccgttctacgacccgctgagcgactatgtcatactcccaacactctacgaaatcgagaagcatcgtgagaaacacggggatgtcacgtccgtagcggaggactgggagatcatctccccgaatgacggcaagaccttgaggccaggcgagcttcctcctatggtcagcacactgaccacgagccgggaaggcaaggagggtgcactggaagaggcgcaggccactgtggtcgttcacccggagaagaaggggcggcagcatgtgcaagttagggctgtgggtgtcagccatggtggctaaagccgtaggagccaccactttggttgtctactctatctagcagtagcagctatacctgtaggtgcacgcactgtaaaattggatgtacatatatggctatgacctctgtagggactctggttttagaactataaatgggcaccctgcctgcttgtaaatgttcagaaccgaaaac

SEQ ID NO: 4433 - DNA, 1512 bp, Zea mays
cgcgacaggaatccacacgatccgcgggcggcgctgctcctgagatcattggcgatgacactgtgtactactatcatgacatgatagtggaaatgattaaatggggatatcaagaaggaaaaactctctttggatttggttatgatttccgtcaaagcaacaggctctcagagacacttgacagattttccaaaaagctggagtcagtgtacacagcttctggtggaaaaaagatcaatctcattactcattcaatggggggattacttgtgaagtgtttcatctctctgcacagtgatacatttgaaaaatatgtcaagagttggatcgcaattgctgcaccattccaaggtgcccctgggtacataactactagtctgctcaatggaatgtcttttgtcgaaggatgggaatcaagattctttatttccaaatggtgtatgcagcaattgctacttgagtgcccatcaatctatgagttgctggcaaaccctaacttccagtggaaagacatcccactgctacagatttggagagagaatttggataacagtggcaagaaaagtgccctgttagagtcgtatgagcctgaggaagcaataatgatgattaaagaggctctttccagtaatgagatcattgctgatggcatgcatattccggtgccccttaatttggatatattgaattgggcaaaggaaacttatgatcttttatgcagtacaaagcttccggaatcagtgaaattctacaacatttatgggattgattatgatactccacatactgtctgctatggcagtgaacagcatccggtttcaagtcttagtagcctcttatatgctcagggaaaatacgtctatgttgatggcgacggatctgttcccgcagaatcagcaaaggctgacggatttaatgcagtggcaagggttggggtggctgctgaccaccggggaatcgtgtgcagtcgccgcgtgttccggatcgttcagcactggctgcacgctggagaacctgacccgttctacgacccgctgagcgactatgtcatactcccaacactctacgaaatcgagaagcatcgtgagaaacacggggatgtcacgtccgtagcggaggactgggagatcatctccccgaatgacggcaagaccttgaggccaggcgagcttcctcctatggtcagcacactgaccacgagccgggaaggcaaggagggtgcactggaagaggcgcaggccactgtggtcgttcacccggagaagaaggggcggcagcatgtgcaagttagggctgtgggtgtcagccatggtggctaaagccgtaggagccaccactttggttgtctactctatctagcagtagcagctatacctgtaggtgcacgcactgtaaaattggatgtacatatatggctatgacctctgtagggactctggttttagaactataaatgggcaccctgcctgcttgtaaatgttcagaaccgaaaacacaggccctgttcttttt

SEQ ID NO: 4434 - DNA, 1740 bp, Zea mays; identical to SEQ ID NO: 1109

SEQ ID NO: 4435 - DNA, 1718 bp, Zea mays
ggaattccttcctccttttctgttcggcgccgtgctcgcgcgcacccacccgcacgccccagtacccccacgctgcacagtgcacgccgactttcctccgccttgctgctgcaagtccgcaaccactggaggaaaaatcttttccttcacttttcttccctttccccccgcgcatgcacgggctctgattgacgccatgggggacgccgcggcctccacgtccgctcccaccacgcccacctccatcctcatctgcctggaagacggcagcgaccttctcgccgatgccgacgatggcgccggcactgacctcgttgtcgcccgcgacgaacgtctgcttgtcgtggaccaggacgaggagtatgtagcgctgctcctgtccaaggagagcgcgtcaggcggcggcggcccggtggaggaaatggaggactggatgaaggccgcgcgctccggatgcgtccgctggatcatcaagaccacggcgatgttccggttcggcgggaagaccgcttacgtcgcggtgaattacctcgatcgcttcctggcgcaacggcgagtcaatagggagcatgcgtggggtctgcagctgctcatggtggcgtgcatgtcgctggcgaccaagctggaggagcaccacgctccgcggctgtcggagttgcccctggacgcgtgcgagttcgcgttcgaccgcgcgtccgtgctgcggatggagctcctcgtcctgggcaccctcgagtggcggatggtcgccgtcacccccttcccctacatcagctgcttcgcggcgcggttccggcaggacgagcgccgggcggtcctcgtgcgcgccgtggagtgcgtcttcgcggcgatcagagcgatgagctcggtggagtaccagccgtcgaccatcgccgtagcatccatcctcgtcgctcgcggcagggagacgcccgccggcaatctggacgcgctcaaggcgatcctgggctcatcatttccgcagctagacaccgggcatgtgtactcctgctacagcgcaatgattcgggaggacgacaagtcgccgacgcagtcgacgtcgacgtcgacgggggtggcgtcctcgggcgtctctgtcgccgcgcacgccggggggagcgggagtcccagccccccgggcgcttccgtgtccgtgggcgccaataatgccgctggcaccgccccgccggcaaccacggacaaccgcaacaagaggagacggttgcgctcacctcagcgacagtaggagcagctcagctgctggcagtgcattgcagtgcagtgcagtccagctgcgttttcttttttcagctcaccatttccttttgctgccgattgtttcttcaggggtggccgtagagtgatttggtaatttagtgccggaaagattagtgcggtgtcgcagagtgatttggtaatttagtgccggaaagatttctttgttttgaggagatctttcgcgggaccaaagggaggggggcagtgtaaagacgacagaacaagcgtgaaggcctcgagagtcgagacctcacagggtaccgcctagcgcctactggggtgaaagtgaagtcaaggagtcgggagggtgtgtgtgaataccgtttgtagcagctagtgcgtccgtctgtctttttttttttctttctgtttattaattattaatagcctgctagatttcatttaaaaaaaaaaaaaaaaaaaaaaaaaaaaaaaaaaaa

SEQ ID NO: 4436 - DNA, 1285 bp, Zea mays
actggaggaaaaatcttttccttcacttttcttccctttccccccgcgcatgcacgggctctgattgacgccatgggggacgccgcagccgccgcggcctccacgtccgctcccaccacgcccacctccatcctcatctgcctggaagacggcagcgaccttctcgccgatgccgacgatggcgccggcactgacctagttgtcgcccacgacgaacgtctgcttgtcgtagaccaggacgaggagtatgtagcgctgctcctgtccaaggagagcgcgtcaggcggctgcggcccggtggaggaaatggaggactggatgaaggccgcgcgctccggatgcgtccgctggatcatcaagactacggcgatgttccggttcggcgggaagaccgcttacgtggccgtgaattacctcgatcgcttcctggcgcaacggcgagtcaatagggagcatgcgtggggtctgcagctgctcatggtggcgtgcatgtcgctggcgaccaagctggaggagcaccacgctccgcggctgtcggagttgccgctggacgcgtgcgagttcgcgttcgaccgcgcgtccgtgctgcggatggagctcctcgtcctgggcaccctcgagtggcggatggtcgccgtcacccccttcccctacatcagctgcttcgcggcgcggttccggcaggacgagcgccgggcggtcctcgtgcgcgccgtggagtgcgtcttcgcggcgatcagagcgatgagctcggtggagtaccagccgtcgaccatcgccgtagcatccatcctcgtcgctcgcggcagggagacgcccgccggcaatctggacgcgctcaaggcgatcctgggctcatcatttccgcagctagacaccgggcatgtgtactcctgctacagcgcaatgattcgggaggacgacaagtcgccgacgcagtcgacgtcgacgtcgacgtcgacgggggtggcgtcctcgggcgtctctgtcgccgcgcacgccggggggagcgggagtcccagcccgggcgcttscgtgtccgtgggcgccaataatgccgctggcaccgccccgccggcaaccacggacaagcgcaacaagaggagacggttgcgctcacctcagcgacagtaggagcagctcagctgctggcagtgcagtccagctgcgttttttttttcagctcaccatttccttttgctgccgattgtttcttcaggggtggccgtaaatgcccgaattcgaacggggcaggatcggattcttcggaaaaaaaaaaaaaaaa

SEQ ID NO: 4437 - DNA, 1748 bp, Zea mays
gttccgtgccgtgctcgcgcgcacccaccccgcacgccgcatgccgccttttactccgcgctgctgctgctgctgggacgaagaaaatcttttccttcacctttctctcctctttcccagttcatgcacgggctctgattgacgccatgggggatgccgccgccgccgcagcaacggcctccacgtccgctcccgccacgcccacctccatcctcatctgcctggaggacggcagcgaccttctctccgacgcctacgatggcgccggcgccaccgacttcgtcgtcgcccgcgacgagcatctgcttgtcgaggaccaggacgaggagtacgtcgcgctgctcctgtccaaggagagcgcggcagtatgcgccccggcggaggaggaaacggaggagtggatgaagaccgcacgctccggatgcgtccgctggatcatcaagaccacggcgatgttcgggttcggcgggaagaccgcgtacgtcgcggtgacttacctcgatcgcttcctggttcaacggcgagtcaatagggggaacgagtgggctttgcggctgctcacggtggcgtgcctgtcgctggcgatcaagctggaggaggagcacgcgccgcggctgtcggagttcccgctagacgaggacgagttcgacagcgcgtccatcctgcggatggagctcctcgtcctgggcaccctcgagtggcggatgatcgccgtcacccccttcccctacatcagctacttcgcggcgcggttccgggaggacgagcgccgggcgatcctcatgcgcgccgtggagtgcgtcttcgcggcgatcaaagtgataagctcggtggagtaccggccgtcgaccatcgccgtggcatccatcctcgtcgcgcgcggccgggaggagactcccgccggcagcctggacgcgctcaaggcgatcctggggtcatcgtgcccgcaactagacaccgggcacgtgtactcctgctacagagcgatgattcgggaggacgacaagtcgccgacgcactcgacgtcgacgggggtggcgtcctcgggcgtctctgtcgccgggaacgggagccccagcccgggcgccaataatgccgctggctccggcccgcctgcaaccccggatagccacaagcacaaccacaaccagaggagacggttgcgctcacctcagcgacagtaggaggctaggagctgctgggcagtgcagttgcagtccagctgcatttttcagctcaccattttctttttgctaccgattgtttgtttcttcaggggtggccagaacgcccgaatccaagcgggggcgagatctgattcttcgggttagtgcggtgtcgcagggtgatctggtgatttagtgtcggaaagatcttttgttttgtggagatcttttcccgggatcaaagtgggagggcagtgtaaagactagaccaaagctgaaacagagcaaagctcttgctcaaagcgccaaggcctcagccggtcagacctcacagggtacctaccgaggtgaaagtgatgtcaggagtcggaagtcaatttttgtttttttgtgtgtgtgtgtgaatgccgtctgtaccagctagtccgtctgtctgtcctctatctttctctgattattaaatagcctgtctgtcactgcatcagtggcaaccgttaactagatagtactatttcatttgattatcttgcttcgccttctgttgagtcgatgtcctgttcttcagactgatttccgtcgatg

SEQ ID NO: 4438 - DNA, 1687 bp, Zea mays
gaggaagttcagttccgtgccgtgctcgcgcgcacccaccccgcacgccgcatgccgccttactccgcgctgctgctgctgctgggacgaagaaaatcttttccttcacctttctctcctctttcccagttcatgcacgggctctgattgacgccatgggggatgccgccgccgccgcaacggcctccacgtccgctcccgccacgcccacctccatcctcatctgcctggaggacggcagcgaccttctctccgacgcctacgatggcgccggcgccaccgacttcgtcgtcgcccgcgacgagcatctgcttgtcgaggaccaggacgaggagtacgtcgcgctgctcctgtccaaggagagcgcggcagtatgcgccccggcggaggaggaaacggaggagtggatgaagaccgcacgctccggatgcgtccgctggatcatcaagaccacggcgatgttcgggttcggcgggaagaccgcgtacgtcgcagtgacttacctcgatcgcttcctggttcaacggcgagtcaatagggggaacgagtgggctttgcggctgctcacggtggcgtgcctgtcgctggcgatcaagctggaggaggagcacgcgccgcggctgtcggagttcccgctagacgaggacgagttcgacagcgcgtccatcctgcggatggagctcctcgtcctgggcaccctcgagtggcggatgatcgccgtcacccccttcccctacatcagctacttcgcggcgcggttccgggaggacgagcgccgggcgatcctcatgcgcgccgtggagtgcgtcttcgcggcgatcaaagtgataagctcggtggagtaccggccgtcgaccatcgccgtggcatccatcctcgtcgcgcgcggccgggaggagactcccgccggcagcctggacgcgctcaaggcgatcctggggtcatcgtgcccgcaactagacaccgggcacgtgtactcctgctacagagcgatggttcgggaggacgacaagtcgccgacgcactcgacgtcgacgggggtggcgtcctcgggcgtctctgtcgccgggaacgggagccccagcccgggcgccaataatgccgctggctccggcccgcctgcaaccctggatagccacaagcacaaccacaaccagaggagacggttgcgctcacctcagcgacagtaggaggctataggagctgctgggcagtgcagttgcagtccagctgcatttttcagctcaccattttctttttgctaccgattgtttgtttcttcaggggtggccagaatgcccgaatccaagcgggggcgagatctgattcttcgggttagtgcggtgtcgcagggtgatctggtgatttagtgtcggaaagatcttttgttttgtggagatcttttcccgggatcaaagtgggagggcagtgtaaagactagaccaaagctgaaacagagcaaagctcttgctcaaagcgccaaggcctcagacggtcagacctcacagggtacctaccgaggtgaaagtgatgtcaggagtcggaagtcaattttttttttttgtgtgtgtgaatgccgtctgtaccagctagtccgtctgtctgtcctctatctttctctgattattaaatagcctgtctgtcactgcatcagtggcaaccgttaaccaaaaaaaaaaaaaaaaaa

SEQ ID NO: 4439 - DNA, 1485 bp, Sorghum bicolor
cctccgccctgctgctctcctcccactggacgaccaaaaatcttttccttcacttttctctcccttttccccgcgcatgcacgggctctgattgacgccatgggggacgccgccgccgcagcggcctccacgtccgctcccgacacgcccacatccatcctcatctgccgggaggacggcggcggctttctcgccgacgccgacgacgatggcgacggcgcggacctcgtcgtcgcccgcgacgaacgtctgctggtcgtggaccaggacgaggagtatgtcgcgctgctcctgtccgaggagagcgcgtcaggcagcggcggcgccccggcggaggaaatagaggagtggatgaaggccgcgcgctccggatgcgtccgctggatcatcaagaccacggcgacgttccggtgcggcgggaagaccgcctacgtcgcggtcacttacctcgatcgcttcctcgcgcaacggcgagtcaatagaaggcaggagtgggctttgcagctgctcgcggtggcgtgcctgtcgctggcgatcaagatggaggagcagcacgcgccgcggctgtcggagttccgggtggacgcgtacgagttcgacagcgcatccatcctgcggatggagctcttcgtcctgtccactctcgagtggcggatgaacgccgtcacccccttctcttacatcagctgcttcgcggcgcggttccgggaagacgagcgccgggcgatcctcctgcgcgccgtggagtgcgtcttcgcggcgatcaaagcgacgagctcggtggagtaccagccgtcgaccatggccgtcgcatccatcctcgtcgcacgcggcaggaatctggacgcgctcaaggcgatcctgggctcatcatgtccgcacatagacaccgagcatgtgtactcctgctacagcgcgatggttcaggacgacgacaagtcgccgacgcgctcgacgtcgacgggggtggcgtcctcgggcgtctctgtcgccgcgcacgccgggagcgggagcgggagccccagcccgggcgcctccgtgtccgtgggcgccaataatgccgctggcaccgccacgccggacaaccacagcaacaagaggagacgggagggggtggccaaaaatgcccgaatccaaatgggggcgagatttgattcttcggattagtgcggtgtcagcagggtaatttagtgctggaaagatttttggttttgaggagatctttcccgggatcaaagggggcatggcagtgtaaggaccaaagctgaaacagagcaaagctcttgctcaaagcgggaaggcctcagacagacctgacttcacagggtacctaccatggtaaaagtgagtgaagtcaaggagtagggagtcaattgtttttttttgtgtgtgaatacccgtctgtaccaggctaccagctaatcccggctgtctgtcatcttttctttctctgtttattaattattaatagccagtcactgcatc

SEQ ID NO: 4440 - DNA, 1059 bp, Zea mays
cgggctctgattgacaccatgggggatgccgccgccgccaccgcaacggcctccacgtccgctcccgccacgcccacctccatcctcatctgcctggaggacggcagcgaccttctctccgacgcctacgatggcgccggcgccgccgacttcgtcgtcgcccgcgacgagcatctgcttgtcgaggaccaggacgaggagtacgtcgcgctgctcctgtccaaggagagcgcgttagtatgcgccccggcggaggaggaaacggaggagtggatgaagaccgcacgctccggatgcgtccgctggatcatcaagaccacggcgatgttcgggttcggcgggaagaccgcgtacgtcgcggtgacttacctcgatcgcttcctggttcaacggcgagtcaatagggggaacgagtgggctttgcggctgctcacggtggcgtgcctgccgctggcgatcaagctggaggaggagcacgcgccgcggctgtcggagttcccgctagacgaggatgagttcgacagcgcgtccatcctgcggatggagctcctcgtcctgggcaccctcgagtggcggatgatcgccgtcaccccctttcccctacattcagctaacttcgcggcgcggttccgggaggacgagcgccgggcgatcctcatgcgcgccgtggagtgcgtcttcgcggcgatcaaagtgataagctcggtggagtaccggccgtcgaccatcgccgtggcatccatcctcgtcgcgcgcggcggggaggagacgcccgccggcagcctggacgcgctcaaggcgatactggggtcatcgtgcccgcaactagacaccgggcacgtgtactcctgctacagagcgatggttcgggagaacgacaagtcgccgacgcactcgacgtcgacgggggtggcgtcctcgggcgtctctgtcgccgggaacgggagagccagcccgggcgccaataatgccgctggctccggcccgcctgcaaccccggatagccacaagcacaaccacaaccagaggagacggttgcgctcacctcagcgacagtag

SEQ ID NO: 4441 - DNA, 2298 bp, Oryza sativa Japonica Group
cccctcccctctccccccgcttcgtctcgttcgagaaatcagaaagagagagaaattcccacgcagcagcaagcaatccaatccgagagcgcgcgtttgcgattattcgctttcgattccgcgaggtttttggagagggaggagaaggaggaggagatgtcgaagggggaagggccggcgatcgggatcgacctggggacgacctactcgtgcgtgggcgtgtggcagcacgaccgcgtggagatcatcgccaacgaccaggggaaccggaccacgccgtcgtacgtcgccttcaccgacaccgagcggctcatcggcgacgccgccaagaaccaggtcgccatgaacccaaccaacaccgtcttcgatgcgaagcggttgattggtaggaggttctccgacccgtccgtgcagagtgacatgaagctatggccgttcaaggtggtgcctggccccggcgacaagccgatgatcgtcgtccagtacaagggcgaggagaagcagttcgccgcggaggagatctcgtccatggtgctgatcaagatgagggagatcgcggaggcctacctcggctcgtccatcaagaacgccgtggtcaccgtcccggcctacttcaacgactcgcagaggcaggccaccaaggacgccggcgtcatcgccgggctcaacgtgatgcgcatcatcaacgagcccaccgccgccgccatcgcgtacggcctcgacaagaaggcgacgagcagcggcgagaagaacgtgctcatctttgacctcggcggcggcacgttcgacgtgtcgctgctcaccatcgaggagggcatcttcgaggtcaaggccaccgccggcgacacccacctcggcggcgaggacttcgacaaccgcatggtgaaccacttcgtgcaggagttcaagcgcaagaacaagaaggacatcagcggcaacccgcgcgcgctgcggcggctcaggacggcgtgcgagcgcgccaagcgcacgctgtcgtcgacggcgcagaccaccattgagatcgactcgctgtacgagggcatcgacttctacacgacgatcaccagggcgcggttcgaggagctcaacatggacctgttccgcaagtgcatggagcccgtggagaagtgcctccgcgacgccaagatggacaagagcagcgtgcacgacgtcgtgctcgtcggcggctccacccgcatccccaaggtgcagcaactgctccaggacttcttcaacggcaaggagctctgcaagagcatcaaccccgacgaggccgtggcgtacggcgccgccgtccaggccgccatcctgagcggcgagggcaacgagaaggtgcaggacctgctcctgctcgacgtcaccccgctgtccctcggcctcgagaccgccggcggcgtcatgaccgtgctcatcccgaggaacaccaccatcccgaccaagaaggagcaggtcttctccacctactccgacaaccagcccggcgtcctgatccaggtgtacgagggcgagcgcgccaggaccaaggacaacaacctcctcggcaagttcgagctctccggcatcccaccggcgccgcgcggcgtgccccagatcaacgtctgcttcgacatcgacgccaacggcatcctgaacgtgtccgcggaggacaagacgacggggcagaagaacaagatcaccatcaccaacgacaaggggcggctgagcaaggaggagatcgagaagatggtgcaggaggcggagaagtacaaggccgaggacgaggagcacaagaagaaggtggacgccaagaacgccctcgagaactacgcctacaacatgcgcaacaccatcaaggacgagaagatcgcctccaagctcgccgccgacgacaagaagaggatcgaggacgccatcgatggcgccatcagctggctcgacaccaaccagctcgccgaggccgacgagttcgaggacaagatgaaggagctggagggcatctgcaacccgatcatcgccaagatgtaccagggccccggcgccgacatggccggaggcatggacgaggacgcgccggcgggcggcagcggcgcaggccccaagatcgaggaggtcgactaaactgctccatggttgccgctcacgatgttctttctgccatcgtctcttttggctgtggcttgatctgtcgtatcgtcgttgcttctggtagaaattaagtgagagttgtgggggaggaacgctgtggtttacctgtggtttggaactttcatctgaacagcttttggatatggcgatgcattcttagttaattattgtgag

SEQ ID NO: 4442 - DNA, 2019 bp, Populus trichocarpa
gcgcttcaaatcctctgctttcattctttcaattcattctcatcctagtttttaattcgctagctatcatcaatggcgggaaagggagaagggccagcgatcggtatcgatctaggcacaacatattcatgcgtcggtgtatggcaacatgacagagttgaaatcatagctaacgatcaaggcaacaggacgacgccgtcttatgttgctttcaccgatacagagcgtttgattggtgatgctgctaaaaaccaggtcgccatgaacccggtcaacaccgtgttcgatgctaagcgtttgattggtaggagatttagtgatccttcagtccagagtgatgttaagctgtggccattcaaggtcattgctggtcctggtgacaagccaatgattgtggttacctataagggcgaggagaagcagtttgctgctgaggagatttcttcaatggttctcattaagatgcgggagatcgctgaagcttaccttggcaccactatcaagaatgctgtggtcacagtccctgcttacttcaatgactctcaaaggcaggctactaaggatgctggtgttattgctggtctgaatgtgatgcgtattatcaatgagcccaccgctgctgccattgcttatggtcttgataagaaggcgaccagtgtgggtgagaagaatgtgttgatttttgatttgggtggtggtacttttgatgtctctcttcttaccatagaggagggtatctttgaggttaaagccacggctggagatacccatcttggaggtgaggattttgataacagaatggtgaaccactttgtccaagagttcaagaggaagaataagaaggatatcagcggaaatcctagagctcttaggaggttgagaactgcttgtgagagggcaaagaggactctctcatctactgctcagaccaccattgagattgattctctgtacgagggcattgatttttactcatccatcactcgtgcaagatttgaggagatgaacatggatctcttcaggaaatgtatggagcctgttgagaagtgtttgagggatgccaagatggacaagagcactgtccatgatgttgtccttgttggtggttctactaggattcccaaggtgcagcagcttttgcaagacttcttcaatgggaaagagctctgcaagagcatcaaccctgacgaggctgttgcttatggtgcttctgttcaggctgctatcttgagtggtgaagggaatgagaaggtgcaggatctgcttcttcttgatgtcactccattgtctcttggattggaaactgctggtggagttatgactgttttgatcccaagaaacaccaccattcccaccaagaaggagcaggttttctccacctactcggacaaccaacctggtgtgctgattcaagtttacgagggtgagagaactagaacaagggacaacaacttgcttggcaaattcgagctctctggcattcctcctgcacccaggggtgttcctcagatcactgtctgctttgatattgatgcaaacggtatcttgaatgtctctgccgaggacaagactactggccagaagaacaagattactatcactaacgataagggaaggctgtccaaggaagagattgagaagatggtagaggaggctgagaagtacaagtcggaggatgaggaacataagaagaaggtcgaagccaagaatgctctggaaaattatgcttataacatgaggaacaccgtgaaggacgagaagattggatccaaactgaacccagctgacaaaaagaaaatagaggatgcgatcgatcaggccattcactggctggacagcaaccagcttgccgaggctgatgaattcgaggacaagatgaaggaattggagagcatttgcaatcctataattgcaaagatgtatcagggcgacggtgctgacatgggtggccgcatggatgaagatgctccctcgactggtggcagcggtgctggccccaagattgaagaagtcgattga

SEQ ID NO: 4443 - DNA, 2190 bp, Gossypium hirsutum
aacttgaaaccctagccgttcgtagctgattctcagttttcgttatttttcttctttgttctttacattcttttcgtctacacaacagatagttagtaatggccggtaaaggagaaggtccagctatcggtatcgatctcggtacaacttattcttgcgttggtgtttggcaacatgaccgtgttgaaatcatcgctaacgatcaaggtaacagaacgacgccgtcttatgttggttttactgataccgagcgtttgatcggagatgcagcaaagaaccaggttgcaatgaacccgattaacaccgtcttcgatgctaagaggttgattggtcgtagattcactgattcttcagtgcaaagtgatatcaaattgtggccattcaaggtcatagcaggacctggtgacaaaccaatgattgtcgtcaattacaagggcgaggagaagcaatttgctgctgaggaaatctcttctatggtccttattaagatgcgtgaaatcgctgaggcttaccttggttttacagttaagaatgccgttgttaccgtccctgcatacttcaatgactctcagcgtcaagcaacaaaagatgctggtgtcattgccggactcaacgtcatgcgaatcatcaatgaaccaacggctgcagccattgcttacggtcttgacaagaaggcaaccagtgttggtgaaaagaatgtcttgatctttgatctcggtggcggtacttttgatgtctcccttctcaccattgaagaaggtatctttgaagtgaaggccactgccggagacactcacctcggaggcgaagatttcgacaaccgaatggtgaaccatttcgtgcaagagttcaagagaaagaacaagaaagacattagtggtaaccctagagctcttagaaggttgagaacttcttgcgagagggcgaaaagaactctttcgtccaccgctcaaaccaccattgaaatagattcgttatacgaaggtattgacttttactcaaccataacccgagccagatttgaggagctcaacatggatctattcagaaagtgtatggaaccagttgagaaatgcttaagggatgccaagatggacaagagcagtgtccatgatgtcgtcctcgttggtggttccactagaattcccaaagttcaacaactattgcaggatttcttcaatggtaaagagctttgcaaaagcatcaaccctgacgaagctgtcgcgtacggtgccgcagtccaagccgcaattttaagcggcgaaggcaatgaaaaggtacaagacctcctgcttttagatgtcaccccgttatccctcggattagaaaccgccggcggtgtgatgactgttttgatcccaagaaacactaccatccccaccaagaaagaacaggtcttttcaacatactccgataaccaacccggtgtattaatccaagtttacgaaggtgaacgaacaagaacaagagataacaacttattaggcaaattcgaactctccggcatcccaccagctccacgaggtgtaccgcaaatcaccgtgtgcttcgatattgacgccaacggcatcttaaacgtttcagccgaagacaaaacaaccggtcaaaagaacaaaatcaccatcacgaacgataaaggaagactttcgaaagaagagatcgaaaagatggttcaagaagctgagaaatacaaatctgaagacgaagaacacaagaagaaagtggaagcaaagaacgcattggagaattacgcttacaacatgagaaacacagtgaaagatgaaaagattggttcaaagctctcaccagatgataagaaaaggattgaagatgctattgaagaagctattcaatggttggatagtaaccagttggctgaagctgatgaatttgaagataaaatgaaggaattggagagtgtttgtaaccctatcattgctaaaatgtaccaaggtgctggtggtgatatgggtggtagtatggatgaggatgctcctccgtctggtggaagcggtgctggccccaagattgaggaagtagactaagtaattggtgtgggctctattttaaattagattcgcttaaaatacagtttattgcttgaacttgggtaatttattttgatattggtttttagacttgtttttcaatgagatgacttttaatcctttataaaaaaaaaaaaaaaaa

SEQ ID NO: 4444 - DNA, 2225 bp, Dactylis glomerata
cgcgattctctttcagatctcgagttccagttccgatttcgtgtttcgaatcccccgttcgagcttagagaggaggaggagatggcgaagaagggaggggagggcccggcgatcggcatcgacctcggcaccacctactcctgcgtcggcgtgtggcagcacgaccgcgtggagatcatcgccaatgaccaggggaaccggaccacgccgtcgtacgtcggcttcaccgacaccgagcgcctcatcggcgacgccgccaagaaccaggtggccatgaaccccaccaacaccgtcttcgatgccaagcggttgatcggtaggcggttctccgacccgtcagtgcagagcgacatgaagctgtggccattcaaggtcattcccggccctgctgacaagcccatgatcgtcgtccagtacaagggagaggagaagcagttcgctgcggaggagatctcctccatggtgctcatcaagatgaaggagattggggaggcctacctcggcaccaccatcaaaaacgctgtggtgacggtgccggcctacttcaacgactcgcagcggcaggccaccaaggacgccggtgtcatcgccggcctcaatgtgatgcgcatcatcaacgagcccaccgcagctgccatcgcctacgggcttgacaagaaggccagcagctctggcgagaagaacgtgctcatcttcgaccttggtggcggcacgtttgatgtgtcgctgctcaccattgaggagggcatcttcgaggtgaaggccaccgccggcgacacccaccttggcggcgaggacttcgacaaccgcatggtgaaccacttcgtccaggagttcaagaggaagaacaagaaggacatcagcggcaatcctcgcgccctgcgccggctgcgcacagcctgcgagcgcgccaagcgcaccctgtcgtcgactgcccagaccaccatcgagatcgactctctgtatgagggcatcgatttctactcgaccatcaccagggctcggttcgaggagatgaacatggacctgttccgcaagtgcatggagcccgtggagaagtgcctgcgcgacgccaagatggacaagagcactgtgcacgacgtggtgctcgtcggcggctccacccgtatccccaaggtgcagcagcttctccaggacttcttcaacggcaaggagctgtgcaagagcatcaaccccgacgaggccgtggcctacggcgctgctgtccaggccgccattctcagcggcgagggcaacgagaaggtgcaggacctgcttctcctcgatgtcacccctctgtctctcggcctggagaccgccggcggcgtcatgacgacgctcatcccgcgcaacaccaccatcccgaccaagaaggagcaggtcttctccacctactccgacaaccagccgggcgtcctgattcaggtgttcgagggcgagcgtgccaggaccaaggacaacaatcttctgggcaagttcgagctctccggcattcctcctgctccccgcggcgtgccccagatcactgtctgcttcgacatcgacgccaacggcatcctcaacgtctcggccgaggacaagaccgccggggtgaagaacaagatcaccatcaccaacgacaaggggcggctcagcaaggaggacatcgagaagatggtgcaggaggcggagcggtacaaggcggaggacgaggaggtgaagaagaaggtggacgccaagaacgcgctggagaactacgcctacaacatgaggaacaccatcaaggacgacaagatcgccgccaagctctcggccgacgacaagaagacgatcgaggacgcggtcgacggcgccatcagctggctcgacaccaaccagctcgccgaggcggacgagttcgaggacaagatgaaggagctggagggcatctgcaaccccatcatcgccaggatgtaccagggccctggcgcggacatgggcgggatgccgggcatggctggcggcatggacatggacgaggatgtgccggcgggtggaagcggtgctggccccaagatcgaggaggtcgattaagttcgtcgtgggggagttgaaatctgaactgtgatgttcgtgtcagtctcatcgtttttaggtgttctgctgtcttccaaggccaggtttcaggggtactttgtgatggaagtctgtatggctgcactcgtgaactttgttcgattttaccggcactgtaccggtgtttgcta

SEQ ID NO: 4445 - DNA, 1418 bp, Zea mays; identical to SEQ ID NO: 1110

SEQ ID NO: 4446 - DNA, 1272 bp, Sorghum bicolor
atgccgatctcctcctccctcgccgcgcgcctccgcaccggccactccccggcgcccgcgcccgggcgcgcgcggtggagcccctacgccagaccctctgtgcctgagccctgcggcggcggcaaggcctcacgcccgacccttcgcctcgatccggtgacgacgaggctcctcggccctgttcagaaggcggtgctgtccggatcgagtcgccgtgccgagcccgatgcgcccgaagcatccgcacggcggcgacgcggaaacgacatgacaagcccgaagcctgagccgaagccgaaaccggctaatggagacgataggacgcccgttgaggagaagcgccgcagcagcggtgagggcggtttcgtctttctctgcgcccttgctggacacacggaggctatcagtgggatttctctgccgctgggttccgacaagctctactccggcggcgccgacggatctgttcgcatctgggactgcaattccggcaagtgtgttgatgtcatcaagatgggaggcaaggttggctgcatgatcacccatggcccatgggtattcattggaatttcgaagtctgtggaggcatggaacacaaagacagggatgaaactaagtcttcaagggccttctagtctggtttgttccatggctatcacggatgagatgctgtttgctggtacgagagatggtcgcatcatggcctggaaatttccttctaaggagagtaaaattgaaccagtgttcatcctcagtggccatcaacgtccagttgtttcattgtctatctcagcaagaagactatactctggctcacttgacaagaccatcaaagcatgggaccttacgacttggcagtgtgttcaaacactctttgagcataaagctgctgtaacatctgtgctttgttgggacgaaaagttattatcttgctcccttgacaagactgtaaaggtctggactctgtcagagtctggaaaccttcaagccaaatatactcatgctgaggagcatggtttgcgcacactcttcggcatgcaccgagttggtaagacgccagttctcttctgctccctccacaacagcaattgcatccgcttgttcaacctgccatcgttcgatgggatgggcacgctcctctccaagaaagaggtgagaaccatcgagctcacagctggtgggctgctcttcaccggagactgctccggcgagctgaaagtgtggaggtgggcgccccaggaccaggaggcagtggcggatgtgcattcatag

SEQ ID NO: 4447 - DNA, 558 bp, Zea mays
acccaagtccaagcaccttcccaaaaaaatcccccattttcttcgaggcgaggagagcgtgaaagacagggcaccggcagcgacgatgtcggggcgcggcaagggcggagcaaagcgccaccgtaaggtgctccgtgacaacatccagggcatcaccaagcccgcgatccgtaggctggctcggaggggcggcgtgaagcgcatttcggggcttatctacgaggagacccgcggcgtcctcaagatcttcctcgagaacgtcatccgcgacgccgtcacctacaccgagcacgcacgccgcaagactgttaccgccatggacgtcgtctacgcgctcaagcgccagggccgaaccctctacggcttcggaggctaggctggatgcctcttctccttgctgtcgtggatgcctgtttgttgttagggttacttcgtttagttccttgtctgtgacgtgttggactattgttagtagtattcttgaagttgtgtttcgaatgtaatccaatcttatcgttcgagaattgaaatgattcctggccaaaaaaaaaaaaaaaa

SEQ ID NO: 4448 - DNA, 611 bp, Zea mays
accagagtcatcgcggcgtgttcaaatcccacaatcttcttgtagcacaccactgtcttcgtccaactcggcggcgatgtctgggcgcggcaagtgcggcaaggggctgggcaagggtggtgcgaaacgccaccgtaaggttctccgcgacaacatccagggtatcacgaagccggcaatccggaggctggcgaggaggggcggcgtgaagcgtatctccgggcttatctacgaggagacccgcggcgtgctcaagatcttcctcgagaatgtcatccgcgacgcggtcacctacaccgagcacgctcgccgcaagaccgtcaccgccatggatgttgtgtacgccctcaagcgccagggccgcactctgtacgggttcggtggttgagcgcatctcttccctcgtctgcagcggctgccggtggcgtttcctcagttccctctgccttgcttggcttgatgtagagagttatcagattaaaatatctctgatgtgcttcgttattgggtggaatcatgtgtcccagcagtgctgggaaatcgagatcaagatgtatctttctttgcagtaatgaaatgttaaaatcgagaccaaaaaaaaaaaaaaaaaa

SEQ ID NO: 4449 - DNA, 515 bp, Capsella bursa-pastoris
gagggaagggattgggaaagggaggagcgaagaggcacaggaaggttcttagagacaacatccaaggaatcaccaagccagccattcgtcgtctggctcgtagaggtggtgtgaagcgtatcagcggtctcatctacgaggagaccagaggagtcctcaagatctttctcgagaatgtcatccgtgacgccgtcacctacactgagcacgccaggaggaagactgtgaccgccatggatgtcgtctacgccttgaagaggcaaggtcgcactctctacggtttcggcggttaatcgatctcttcgatttattagggcttatggcaagtttgggctgtttctgagattctctgttaaaaaaaaaagtaaatctaggagtttagctgctactactactgcttttatttctcttgtattgtttgttctttagccaatgtgatgtgatgatgttagttcaaatatctttgcaaaaacttatgcttagaaagttcaatgaaaatgaaccaaattgctctc

SEQ ID NO: 4450 - DNA, 613 bp, Zea mays
atcttctcccccagctccccagcaccagtccccaattatttggcctccgtcagagaggggagaaagacccgttcgaggcggcggcgatgtcggggcgcggcaacggcggcaagggtctgggcaagggtggagccaagcgccaccggaaggtgctccgcgacaacatccagggcatcaccaagccggcgatccggaggctggctcggaggggcggcgtgaagcgcatctcggggctcatctacgaggagacccgcggcgtgctcaagatcttcctcgagaacgtcatccgcgacgccgtcacctacaccgagcacgcgcgccgcaagaccgtcaccgccatggatgtcgtctacgcgctcaagcgccagggccgcaccctctacggcttcggaggctaggcgcctcttcgtagctggggaatgcttagggtgatacgtctctgtcgctgtgggtcgtagtgttgctgcgttcctggatgtaatccattttttttttctgcaatgaagagatgctggcaagcatactacctgcatatgttgcgcctgggtgattgttctccttagaaatggtagtaacagtgaatcttgttcacgaaccaaaaaaaaaaaaaaaa

SEQ ID NO: 4451 - DNA, 508 bp, Arabidopsis thaliana
atcagaaaactcaaatcttaaaactttctggaaaaacaaaaatgtcaggaagaggaaaaggaggaaaagggttaggcaaaggaggagcaaagagacacagaaaggttctaagagacaacattcaaggaatcacaaagccagcgattcgtcgtcttgctcgtagaggaggtgtgaagagaatcagtggattgatctatgaagaaacgagaggtgtgttgaagatttttctggagaatgtgattagagatgctgttacttacactgagcatgcgaggaggaagacggtgactgctatggatgttgtttatgccttgaagagacaaggaagaactctatatggatttggtggttgatcaatttgagatctgggttttctggtgaatgatgatgatttaagtcttgcgatcaagaaattccagaaattgggttgaattttagggtttcgttttgtgttgtaattagggcagcattgtaatggattaatgataagtaccatttgctctaatta

SEQ ID NO: 4452 - DNA, 525 bp, Hyacinthus orientalis
  misc_feature (13)..(13): n is a, c, g, or t
ctcaatttctggnacaagcgatgtcgggcagacgaaagggcggaaagggactgggaaagggcggagcgaagcgccacaggaaggtcctccgggacaacatccagggcatcaccaagccggcgatccggcggttggcgaggagaggcggagtcaagaggatcagcgggctgatctacgaggagacgaggggagtcctcaagattttcttggagaacgtgatccgcgacgcggtgacctacaccgagcacgcgaggaggaagacggtgacggcgatggacgtggtctacgcgcttaagaggcaggggaggactctctatgggttcggtggttagacttttgcttctctaaaagagtcttgctgtcaagaaatcgatggtgtacggagattgatgtttgggtttgattcacgtttattgtcggttgcgttgtgttcatctgtagtgtgtttcagtttgtgaatatgtttttgctttctagagctcggaactaatgaaatgaattcaacttcctttaaaaaaaaaaaaa

SEQ ID NO: 4453 - DNA, 520 bp, Malus x domestica
atcaactccaatttcttgcccaaaaattttcctgagaaaatgacaggacgaggaaagggcggcaagggattgggcaagggaggagcgaaacgacatcgtaaggttctgagggacaacatccagggcatcaccaagcctgctattcgccgtcttgcccgccgaggtggtgttaagcgaatcagcggtctgatctacgaggagaccagaggagttctgaagatctttttggagaatgttattcgtgatgctgtgacgtacaccgagcacgccaggaggaagactgtgaccgccatggatgtcgtgtatgctttgaagaggcagggaaggaccctatacggtttcgggggttaaattgggaattttatgtcattattttgggaattagggttaggtttgcttaggatctgggctttagatctttgggtttaatttgtattttgttggtaacggttagtgtttatgtaatttgtaatcttattttgaagtaatataagttcgacctgttagtaaaaaaaaaaaa

SEQ ID NO: 4454 - DNA, 2387 bp, Oryza sativa Japonica Group
aactctttgcaaaagaattccgagctcgcaaggcgaagaaatctcgcaacaatctcatcagatctcgagatctcatcaggtttggtttgttcccgtcggatttttcttttccactgttcgatcttcctgttcgtgcgagatggcgaagggagagggcccggcgatcggcatcgacctcggcaccacctactcgtgcgtcggcgtgtggcagcacgaccgggtggagatcatcgccaacgaccaggggaaccgcaccacgccgtcgtatgtcgcgttcaccgactccgagcggctcatcggcgacgccgccaagaaccaggtcgccatgaaccccatcaacaccgtcttcgatgccaagcgactgataggtaggcggttctccgacccgtccgtgcagagtgacatgaagctgtggccgttcaaggtcatccctggccccggcgataagcctatgattgtggtgcagtacaagggcgaggagaagcagttctccgccgaggagatctcctccatggtgctcatcaagatgagggagatcgctgaagcctacctcggctccaacatcaagaacgccgtggtgactgtgccggcctacttcaacgactcgcagaggcaggccaccaaggacgccggtgtcattgccggcctcaacgtgatgcgcatcatcaacgagcccaccgccgcggccatcgcctacggtcttgacaagaaggccaccagctccggcgagaagaacgtgctcatcttcgatcttggcggtggcacgttcgatgtgtcgctgctcaccattgaggagggcattttcgaggtgaaggccactgctggtgacactcaccttggtggtgaggacttcgacaaccgcatggtgaaccatttcgtcctggagttcaagcgcaagaacaagaaggacatcagcggcaacccgcgtgctctgcgccggctgcgcacggcctgcgagcgcgccaagcgcacgctgtcgtcgaccgcacagaccaccattgagatcgactccctgtacgagggcatcgacttctactcgaccatcaccagggctcgcttcgaggagctcaacatggacctgttccgcaagtgcatggagccggtggagaagtgcctgcgcgacgccaagatggacaagagcagcgtgcacgacgtcgtgctcgtcggcggctccacccgcatccccaaggtgcagcagctgcttcaggacttcttcaacggcaaggagctgtgcaagagcatcaaccccgacgaggccgtggcatacggcgccgctgtccaggccgccatcctcagcggcgagggcaacgagaaggtgcaggacctgcttctgctcgacgtcacgccgctgtcgctggggctcgagacagcaggaggtgtcatgaccgtgctcatcccgaggaacaccaccatccccaccaagaaggagcaggtgttctcgacctactccgacaatcagcctggcgtcctgatccaggtgtacgagggtgagcgtgcccggaccaaggacaacaacctgctgggcaagttcgagctctccggcatccctccagctccccgcggcgtgccccagatcaccgtctgctttgacatcgacgccaatggcatcctcaacgtctctgccgaggacaagaccaccgggcagaagaacaagatcaccatcaccaacgacaagggcaggctgagcaaggaggagatcgagaagatggtgcaggaggcggagaagtacaaggcggaggacgaggagcacaagaagaaggtggacgccaagaacgcgctcgagaactacgcctacaacatgaggaacaccatcaaggacgacaagatcgcctccaagctctcggcggacgacaagaagaagatcgaggacgccatcgacggcgccatcaactggctcgacagcaaccagctcgcggaggcggacgagttcgaggacaagatgaaggagctggagagcatctgcaaccccatcatcgcgaagatgtaccagggcgccggcgcggacatgggcggcgccgctggcatggacgaggacgcgccggcgggtggcagcggtgcaggccccaagatcgaggaggtcgattaagctggtggtggtcctacgtgattccggctggaagggagtctgaaccgtgtgatgtggctggcgtcgtgtgatcccctgtgttttttagccgtcgagagtttcgtgcgatgaagcttttgtaagtgtgtatcgccgtatggttttacctgaacttgctctgaaatagtttaagctttgacctaaatcgctctgtctctctctttttgtgcggcttgcggcttgcctgcttcacgagttcgttcggtcgcagtttcagacagaggattagccgcaagtttgttctattgcccttatcttttcg

SEQ ID NO: 4455 - DNA, 1996 bp, Arabidopsis lyrata subsp. lyrata
ccggcgaacaattctgatctctaatggcgggtaaaggtgaaggtccagctattggtatcgatctcggtacaacttactcttgcgtcggtgtttggcaacatgaccgcgtcgaaatcatcgccaacgatcaaggcaaccgtaccactccttcctacgttgctttcactgatagcgaacgtctgatcggagatgctgcgaagaatcaagtcgccatgaaccctaccaacaccgtctttgatgctaagcgtctaattggaagaagatacagtgatccctctgttcaagcggacaagagtcactggccttttaaggttatttctggtccaggtgagaagcctatgatcgtggtcaatcacaagggggaggagaaacagttctctgctgaggaaatctcttcgatggttctcgttaagatgcgggagattgcagaagctttccttggtactccagttaagaacgctgtggttacagttcctgcttatttcaacgactctcagcgtcaggcgactaaggatgctggggttatctctggtctcaatgtcatgcgtatcatcaatgagccaactgctgctgcgattgcttacggtcttgacaagaaggcgtcgagtgttggcgagaagaatgttcttatctttgatttgggaggtggtacttttgatgtgtctttgcttacgattgaggaaggtatctttgaagtgaaggcaacagctggtgacacgcatcttggtggtgaggactttgacaacaggatggttaatcattttgttcaggagtttaagaggaagaacaagaaggatattactggtaatccaagagctttgaggaggcttaggactgcttgtgagcgggcgaagagaactctttcttcgactgctcaaacgactatagagattgactccctttttgagggtattgatttctacacaaccatcactcgtgctaggttcgaggagctcaacatggatttgtttaggaagtgtatggaaccagtggagaagtgtttgagagatgctaagatggacaagaacagtgtacatgatgttgtccttgttggtggctctacaagaatccccaaggtgcagcagctattgcaagactttttcaacgggaaagagctctgcaaaagcattaaccctgatgaggctgttgcttacggagcagctgttcaagctgcaatcttaagcggtgaagggaatgagaaggtccaagacttgttacttcttgatgtcactcctctatccttgggtttggaaactgccggtggtgttatgactgtcttgattccgaggaataccacaattccgaccaagaaagagcagatcttctcgacctattcagacaaccagcccggtgtattgatccaggtttacgaaggggagagagcacggacaaaggacaacaatcttttgggaaagttcgagctcagcggtataccacctgctccacgaggagttccgcagattactgtttgtttcgacatcgacgccaatggtatcctgaatgtgtcggctgaggacaagacgactggacagaaaaacaagatcacaatcacaaacgacaagggaaggttatcgaaggaagagatcgagaagatggtacaagaagcagagaagtacaaggctgaggatgaagaacacaagaagaaggttgatgcaaagaacgctctcgagaactatgcatacaacatgaggaacacgatcaaagacgagaagatcgcatctaagctcgatgcagctgacaagaagaagattgaggatgcaatcgaccaagctattgaatggttagatgggaatcagctggctgaggcagatgagttcgaggataagatgaaggagctcgagtctatttgcaacccaatcattgccagaatgtaccaaggtgctgggccggatatgggtggtgctgcaggaatggatgacgatgctcctgctagtggtagcggtggtgctggccccaagattgaagaagttgattaagctctttagcttctctgttc

SEQ ID NO: 4456 - DNA, 1603 bp, Zea mays
atctgataatactcgtctctctgctcacaagtcacaaggaggggagcgaggcggcggccaacacctagcagctccgaaccctagctccggccactggcggcgatggctgctgctacggcgttccggtcggggacgaggcggggcgacgctctcgcgcccgtagaggacgcgggctccgccactcgcgagcgccaggccgcgggccgcggcggaggcagcgtccgccggtcgaagagcctgagccggttcccgccgccgtcgccctccaccgaggacacggcgacgccgtcgtcgaggttcgtcaacaaggtgcggggcgggggaagcggcggcgtcttcccgccgcaggtcagcctcgacgacctcgccgacgagttcttccgggccagggccgagtccgaggacgacgacgacgaggagactgctgcgcgcggccggtcaaggcttccagcggccgcagagcgtgggggcggtggcgctggcggtcggcggagctccaccgcgcggtacgctaggcagacggagtcttcgcggcagcgcgggcgctccgtgtcgcggccgccagccgagcggcgaggcgtagcggccaatgcggtggatggcggccctgcagccaggaggcagcgttatgcgtcggtcgaccggcgcgctgccatggatcgacaacggtggtgcgattcggataatgatatggaagttcctcaccagtatgtttctagggggatgcataccaaaagtagcagtggcaatagcctgcagagttcattccataagccatctaaagcaaatcaagctttgaagaggtctacaagtcaaaaggatttctttcattctagagacagcagctccagccattcttcaattactgatgatgagtctaggagttcactctctttccatagcagaaatcagaaggctgtctgtgcagtttatggtcttgacaaggagcacggaattgatgatggggctggaaatgtattgtacgatgtaatgcgaaaagaagttaggcaagctgttgaggaaataaggaatcagcttgaagaggccatgacaaaatctgaaccttcagaaaaggcaataaacagtgatgcacaaccaacccaagttattactcagctccgaaggagctacactagtaaattggaagagtcagagaagcggaagcaggaactgttagctcaattggcagcagaagaacaccatggtcatgagctcacaaaaatagttagagaattgctacctactcctaaaaagactgcaaacttacaaagacagccacactacagaagaaggagcaatgatagatcaaggatgtcaaaacgacttactgaagaggctgaacaatactttgaagatttcctgtcgaatgttgaagacactgacttttcttcatatcctcgcatttcaactttcccatagagagttaagaaggatccacacgttcagcagcacgtgtgggcttgtaggagctttatgatttgaggcaattagggacaactcttatgtcattgttgcttgcttctgtggagtcgaacagatgtttcgctaacataattcgacttgagtgatgaaagcctccaaaaaacgaaaaaaaaaaaaaaaa

SEQ ID NO: 4457 - DNA, 1682 bp, Sorghum bicolor
gggccgatccggttccggccatggcgaagccggcgcgggcgccgaggccgaagccgccgccggcgcgggcgtccgcccgtcggctcctgggccttggcgggctcggcgtcgcggcggcggcgtacgtgggcgtggactacctgcggtacctctcgccggcgtggcacggccggctgcagccggcgctgtgggcggcgctggcgctcgcggccgccgcgcgcgccccgttctaccgccactggtccgcggagctgcgcgccgcgctgcccttcctgggatccatcgccttcatgctcgccgccttcctctgcgaggccatctctgtccgcttcgtctccgccgtcatggggctgcactggcacggaactgccgcgcctcttcctgacacgggtcaatggctgcttttatcattgaatgagaagctccctcagagcgtggttgatctactgagagctcacattatcactcttcaccattatctgatgttgttcatcatgttggggttctcagttctgtttgactgcatcaaagctcctggtcttggtatagccacaagatatatgttcactatggcaattggtcgtgtgcttcggacgataactttcattgctaccattcttccatctgcaagaccttggtgtgctgcagcacgttatcaaatacctcaacatcctcatccttgggcacagaaatattatgttccatatgcttctgattcaaatgctattcgtagagtcataacacatgatatggcatatgcggctgttcaagcttacccagatgaatataggcccgattggggacgtatgagcttccttgtagacatcttgagaccaactcctggagaagggccttcatggtaccatcttttgaagaaagctagtggcggttgcaatgaccttatgtacagtggacacatgctcgttgctgtccttactgcaatggcgtggacggaagcatatgggggctggatctctgttgcaatatggctcctcgtcctgcacagcgcacagagggaggtacgtgagcggcaccactacagcgtggactgtgttgctgctatctacgttggcatcctgctgtggaggatgacagggttcatctggtctgccagagacctgacccgagctagacggctagccaagcttgaggagatccagagcaggttggtccatgctgccaaggacagtgacattgacgagatcaggggcctgctgaaggaggtggagctagccggccaggagaagcagggcttctcgcagagggctatcctgacctttgccgcaggaacaatcatcttcaccttgtcttgtgttctcattgccttcacaatgactagcgacggttgatttgggttctgctggatgcccctggatctgaatgttagccactttttcctgggctatacactatactgttttcttgtagtgtgttcagtgtcatttgtggagccttgaggggaaccatgtttaaacagaaatgtaactagatcctagtggtgccaaaattcgtggatgttttgcagctgcacgggaagctgatgggttgtcggtagaattttggttgctgtagctaagttttactcaaacagaggttgaggctttcattgcttgcaaggcactgtaggctgtagcgcagcttatgctactgttttgcaatgagataggctgtaccacagctta

SEQ ID NO: 4458 - DNA, 1654 bp, Zea mays
attgccatctgcccatctctaccgacgaccaactgaactgaccgagtgagcgacgccgacctcgggctggtcggggcgatccggttccaggcttccggccatggcgaagccgccgcgggcgccgaggcccaaactgcagacgccgcgggcgccggcccggcggctcctcggcctcggcgggctgggcgtcgcggcggcggcgtacgtgggcgtggactacttgcggcacctctcgccggcgtggcacggccggctgcagccggcgctgtgggcggtgctggcgctcgcggccgccgcgcgcgcgccgttctaccgccactggtccgcggagctgcgcgccgcactgcccttcctgggatccatcgccttcatgctcgccgccttcctctgcgaggccatctctgttcgcttcgtctccgccgtcatgggactgcactggcacagaactgccgcgccgcttcctgacactggtcaatggctgcttctatcattgaacgagaagctccctcagagcgtggtcgatctactgagagctcatgttatcactctccaccattatctgatgttgtttatcatgctgggtttctcagttctgttcgactgcatcaaagctcctggtcttggtattgccacaagatacatgttcactatggcaattggtcgtgtacttcggacgataactttcatcgctaccattcttccatccgcaaggccttggtgcgctgtagcccgttatcaaatacctcgacatcctcatccttgggcacagaaatattatgttccatatgcttctgactcgaatgctattcgcagagtcataacacaggatatggcatatgctgctgttcaagcttacccagatgaatataagcccgattggggacgtatgagcttccttgtagacattttgagaccaactcctggagaagggccttcgtggtaccatcttctgaagaaagctagtggcggctgcaatgaccttatgtacagtggacatatgcttgttgctgtcctgactgcaatggcgtggacggaagcatacgggggctggatctctgtcgcgatatggctcctcgtcctgcacagcgcgcagagggaggtacgcgagcggcaccactacagcgtggactgcgtcgccgcgatctacgttggcgtcctcctgtggaggatgacggggttcatctggtccgccagagacctggcccgagctagacggctagccaagctcgaggaggtccagagcaggctggtccacgccgccaaggacagcgacatcgatgagatcagaggcctgctgaaggaggtggagctatccggccaggagaggcagggcttctcgcagagggcgatcctggccttcgccgcaggaacgatcatcttcaccttgtcttgtgtcctcatcgccttcacagctactagcgacggctgatttgggttctgttgcatgcccctgggtctgaatgttagccactttctcctgggctgcactgttttcttgtagtatgttgactgttgagtgtcgttggttgtggggaaaccatgtttaggactagtttgagaatctcatttttacaagggatttttatttttctttagaaaactagttcattttttcttgagaaaatagaaatcttttttaaaaaaaaaaaaaaaa

SEQ ID NO: 4459 - DNA, 2641 bp, Oryza sativa Japonica Group
tacgtcggggtggactacctgcggtacctctccccggcgtggcacgggcggctgatgccggcgctgtgggcggcgctggcgctcgccgccgcggcgcgggcgccgttctaccgccactggtccgccgagctccgcgccgcgctgccctttctcggctccatcgccttcatgctcggggccttcctctgcgaggccgtctccgtccgcttcgtctccgccgtgatggggctccagtggcacaggtcagtgcacttctccggagctatggagctgacggattattcggtgcccggggtcaaagatgccatggatcttgggggagatttattaagctctttaatagctatttattgcatattttttaatttggatcttgggggaagatttaagctctttgattgtggaaggattttatggtgtgatctagcagagatttgctggtaggagtgcacatttttattagcagattttattgcttattaattcgggtgaaatttgagcataggagagttttataaatttccatatattacactttgtggaattttaaatagttaattttaggtatgaggaatgaagaaagtataaatcagttcaaagcagaaagctgtttgcttagagagaaacgtctgtgtaattggttaaaaacttccagtttgtcgtgcagggtgatttttgttaccgattcttgtttctggagtagacagattagttccggtgagatgatattgtgagattgtgacacaaatgctccattttggttaacctagtcgtgatctcaaggggttcagcttctccataatccaatggcttgtttgttgtgtcctcgctattcttttgtggtttttaacatattgccttttcaactttggaataaagatcaagtttatagtgtttggtaggtgcagtcgaatgaaaaagctttaaatggtaattgccgtttgtaagattacagttcaagtaaggaatcgatgcccttctggaataaagggccatctagaagttcactgggcaagaaagccaagcgtctgtacgtactttggacatgtactcctgatctatttgtgattcctctctcgacttgattgagaagacaaatctaacatttgactgcatctagtcctatggtctcctgaatgcaaattgacaacaagttcataattcctgtgaatttcagctagctataagactacaatattttgtgaagacaaactttatatatttataaactggattatggcccattcagagttaattttcactttcaagaacaatagtgcctttccatataacattaccacttaccatatgtacctttcttcaagtaatttattgccatctgctcacatccatgctcagacaaattctcatgtggaagcatcgaaatcctcacaattacttgtaaactgaagtctgttctactgttttaacagatctgctgctccacttcctgacactgggcaatggctgcttctagcattgaacgagaagcttcctcaaagtgtggttgatctactgagagcccatgttatcactcttcaccattacttgatgttgtttatcatgctgggtttctcagtgctctttggctgcatcaaagctcctggtcttggaatagccacaagatatatgttcactatggcaattggtcgtttgcttcggacgatgacgtttgtggccacaattcttccatctgcaagaccatggtgtgctgcagctcggtatcaaatacccggccatcctcatccttgggcacaaaaatattatgttccatatgcttcagactcagatgctatccgtagggtcatacgagatgatgtggcctatggttagtacatttggctatcacctaattaatattttagtgttgtgaaattgagaaaactaaattatcgtcctcccttttacagctgctgttcaatcttaccctggtgagtataggcctgactggggtcgaatgagcttcctagtagacattttgaggccaactcctggagagggaccttcatggtaccatctactgaagaaagctagtggtggttgcaatgatcttatgtacagtgggcacatgcttgttgctgttcttactgcaatggcgtggacggtatgtcatactttcaccttttccctgttacaacatcaaaatctctatatgtgctgttttgttggaagctggaaatgagttacttgtacttattagaaccacccttcatcaatacaactatgcccttttcttttgcaacagcgctgtgttagagaatagagatacttacaattgatgtcatctgaagttgtgaactccttttgaatctgtctcacgctcttaggaagcatacgggggctggatctccgtcgcaatatggcttcttgtcctgcatagcgcgcaaagggagatacgagaacgccatcactacaccgtggattgtgtcgtggcgatctacgtcggcatactcctgtggaggatgacgaggttcatctggtctgccagagacgccagccgagctagaaggctcgccaaactcgatgaggttcataacaggctaatccatgcggcgaaggactcggacgtcgatgagatcagaggcctgctgaaagaggttgagctggccggccaagaaaagcagggcgtctctcagagggc

SEQ ID NO: 4460 - DNA, 1452 bp, Oryza sativa Japonica Group
atggcgagggcggcgagggggaaggcgccgaggccgaggccgaggccgccgcgcgggctggcggcgagcctccggcggctcctcgccggggccggcggcgggctgggcgtcgcggcggcggcgtacgtcggggtggactacctgcggtacctctccccggcgtggcacgggcggctgatgccggcgctgtgggcggcgctggcgctcgccgccgcggcgcgggcgccgttctaccgccactggtccgccgagctccgcgccgcgctgccctttctcggctccatcgccttcatgctcggggccttcctctgcgaggccgtctccgtccgcttcgtctccgccgtgatggggctccagtggcacagttcaagtaaggaatcgatgcccttctggaataaagggccatctagaagttcactgggcaagaaagccaagcgtctatctgctgctccacttcctgacactgggcaatggctgcttctagcattgaacgagaagcttcctcaaagtgtggttgatctactgagagcccatgttatcactcttcaccattacttgatgttgtttatcatgctgggtttctcagtgctctttggctgcatcaaagctcctggtcttggaatagccacaagatatatgttcactatggcaattggtcgtttgcttcggacgatgacgtttgtggccacaattcttccatctgcaagaccatggtgtgctgcagctcggtatcaaatacccggccatcctcatccttgggcacaaaaatattatgttccatatgcttcagactcagatgctatccgtagggtcatacgagatgatgtggcctatgctgctgttcaatcttaccctggtgagtataggcctgactggggtcgaatgagcttcctagtagacattttgaggccaactcctggagagggaccttcatggtaccatctactgaagaaagctagtggtggttgcaatgatcttatgtacagtgggcacatgcttgttgctgttcttactgcaatggcgtggacggaagcatacgggggctggatctccgtcgcaatatggcttcttgtcctgcatagcgcgcaaagggagatacgagaacgccatcactacaccgtggattgtgtcgtggcgatctacgtcggcatactcctgtggaggatgacgaggttcatctggtctgccagagacgccagccgagctagaaggctcgccaaactcgatgaggttcataacaggctaatccatgcggcgaaggactcggacgtcgatgagatcagaggcctgctgaaagaggttgagctggccggccaagaaaagcagggcgtctctcagagggccatcctggccttcgccgcggctacgatcattttcaccctgacctgtgttgtccttgccttgacattaaccagcgacgggatgcatggttttaacagagatgtaacttga

SEQ ID NO: 4461 - DNA, 1282 bp, Zea mays
cgccgcgcgcgcgccgttctaccgccactggtccgcggagctgcgcgccgcactgcccttcctgggatccatcgccttcatgctcgccgccttcctctgcgaggccatctctgttcgcttcgtctccgccgtcatgggactgcactggcacagaactgccgcaccgcttcctgacactggtcaatggctgcttctatcattgaacgagaagctccctcagagcgtggtcgatctactaagagctcatgttatcactctccaccattatctgatgttgtttatcatgctgggtttctcagttctgttcgactgcatcaaagctcctggtcttggtattgccacaagatacatgttcactatggcaattggtcgtgtacttcggacgataactttcatcgctaccattcttccatccgcaaggccttggtgcgctgtagcccgttatcaaatacctcaacatcctcatccttgggcacagaaatattatgttccatatgcttctgactcgaatgctattcgcagagtcataacacaggatatggcatatgctgctgttcaagcttacccagatgaatataagcccgattggggacgtatgagcttccttgtagacattttgagaccaactcctggagaagggccttcgtggtaccatcttctgaagaaagctagtggcggctgcaatgaccttatgtacagtggacatatgcttgttgctgtcctgactgcaatggcgtggacggaagcatacgggggctggatctctgtcgcgatatggctcctcgtcctgcacagcgcgcagagggaggtacgcgagcggcaccactacagcgtggactgcgtcgccgcgatctacgttggcgtcctcctgtggaggatgacggggttcatctggtccgccagagacctggcccgagctagacggctagccaagctcgaggaggtccagagcaggctggtccacgccgccaaggacagcgacatcgatgagatcagaggcctgctgaaggaggtggagctatccggccaggagaggcagggcttctcgcagagggcgatcctggccttcgccgcaggaacgatcatcttcaccttgtcttgtgtcctcatcgccttcacagctactagcgacggctgatttgggttctgttgcatgcccctgggtctgaatgttagccactttctcctgggctgcactgttttcttgtagtatgttgactgttgagtgtcgttggttgtggggaaaccatgtttaggactagtttgagaatctcatttttac

SEQ ID NO: 4462 - DNA, 1338 bp, Sorghum bicolor
atggcgaagccgaagccgaagaggcccgcgcccccgcggcgggggtgggggtcaggcggtctctggcgccccgtcgcgttgggcggcggcctgccgctggctggcgcggcgtacgtgggcgtcgactacctgcggcatctgtcccccgtttggcacgggcggctgcggccggcgctctgggcagcgctggcgctcgccaccgccgcgcgcgcgccgttctaccggcgctgggacgccgaggtccgcgccgctccgcggttcttcgctaccatagcgttcatgctcgcggcactactctgcgaggccatctccgtccgattcgtcagcaccgtcctcggcctccggtggcaccgatcgactgctcctcttcctgacactggccagtggatgcttctagcattgagtgggaaacttccccaaacagtggttgatctactgaaagctcgcatcatcactcttcatcattacttgatgttgtttatcatgttggcattttcggcattgtttgactgcatcaaaggtcctggactcgggataggctcaaggtacatgttcactatggcagttggacgtttgctccggaccataacatttattgctacgattcttccgtctgctcgaccttggtgtgcccattctcgatatcaaatacctgaccatccacatccttgggcacagaaatattatgctccttatgcttcagatccaaacatgatctggagggtcatgaaagaggatactccatatgctactcttcaagattaccctgatgaatataaacctgactggggattgatgagtttcttagtagaccttttgaggccaagcagtggagaggggccctcatggtatcatttgctgaggaaatcaagtggtggttgtaatgatcttatctatagtggacatatgtttgttgctgtcctaactgctatggcatgggcggaagcatatgggggatggagctctgttgtgatatggttcctcgtcatccacagcgctcagagggaggtacgggagcgccatcattacagtgttgactgcattgtagcaatctacattggggtcctcttgtggaggatgactggcttcctctggtctgcaatggaaaccaatcgatccagaaggctcgccaagcttgatgaggttcagaagagactattccaagctgcaaaggattctgacgtccttgaaataaggagcctgctaaatgaagttgagctggctggtcaagaaaacaagggcttttcacagcgcatcatcttctcctttgctgcagctgtaattgtttttaccgtcttgtttgttctcctggcattcacgctaaccaatgacggttga

SEQ ID NO: 4463 - DNA, 1374 bp, Zea mays; identical to SEQ ID NO: 1111

SEQ ID NO: 4464 - DNA, 1305 bp, Zea mays
gcacccttcggcggccacgcctcgcgcgcgcgcgcggacatggaggtcgaataccacgaggagtacgtgcggagctcgagaggcgtgcagctcttcacctgcggctggctgcccgctgccgcatcgcccaaggcgctcgtcttcctctgccacggctacggcatggagtgcagtggcttcatgagagaatgcggcgtgcggctggcggcggccgggtacggcgtgttcgggatggactacgagggccacggcaagtcgatgggcgcgcgctgctacatccgcagtttccgccgcctcgtcgacgactgcggccatttcttcaagtccgtctgcgagcttgaggagtaccggggcaagagccggttcctgtacggcgagtccatgggtggcgcggtggcgctgctgctgcacaccgaggaccccgccttctgggacggcgccgtcctcgtggcgcccatgtgcaagatatcggagaaggtgaagccgcaccctctggtgatcacgctcctgacgcaggtggaggacgtgatccccaggtggaagatcgtgcccaccaagcaggacgtcatcgacgccgccttcaaggaccccgtcaagcgtgaaaagatcaggaggaaccagctgatctaccaggacaagccgcggctcaagactgcgttggagatgctcaggaccagcatgtacatagaagacagcttgtcacaggtgacgctgccgttcttcgtcctgcacggcgaggccgacacggtgacggacccggaggtgagccgcgcgctgtacgagcgttcggccagcgccgacaagaccatcaagctgtacccggggatgtggcacggcctcaccgccggggagcccgacgagaacgtggaggccatcttctccgacatcgtgtcctggctcaaccaccgcagccggagctgggccgtggaggaacgccatatgaccaggaagctggcgccagctccggccaagtccatcgaaggccacggcaccgtggacggcaaagtgcacacacaacaagggcgccctcggcggcgccagggcttcctctgcgggcttgccggccggacgcatcaccacgcggagatgtgaaagatagaatcgccgtctcggtcccggatcagatgggcgcctgctttcttcaaccatggcaaataaaggaatgatgacctgcggtttataatatagaggtcttattatgcttgtcaaagttatgtatgaccaatcattcccagtctggtgcagattcaaactcatgctcagatatatgtaatgtaagattataacgctattagcattctggat

SEQ ID NO: 4465 - DNA, 1382 bp, Zea mays
tgctgctgctatgtcgtctagggtgttcgttgttttcaaggctacctccccaactcccatccacatactaatattattgcaattttggctttggcttgttgtaatcatgtctgtctgtgtgtgaactaattaaagggtttatcattatatacttttacaaaattaacctgcgtaaaatcaagtgttattcgattgatcctcattctagctgttcctcaataacacgggtgcgtggtcgacgaccgaacgagtgcagaatgcggcgtgcggctggcggcggccgggtacggcgtgttcgggatggactacgagggccacggcaagtcgatgggcgcgcgctgctacatccgcagtttccgccgcctcgtcgacgactgcggccatttcttcaagtccgtctgcgagcttgaggagtaccggggcaagagccggttcctgtacggcgagtccatgggtggcgcggtggcgctgctgctgcacaccgaggactccgccttctgggacggcgccgtcctcgtggcgcccatgtgcaagatatcggagaaggtgaagccgcaccctctggtgatcacgctcctgacgcaggtggaggacgtgatccccaggtggaagatcgtgcccaccaagcaggacgtcatcgacgccgccttcaaggaccccgtcaagcgtgaaaagatcaggaggaaccagctgatctaccaggacaagccgcggctcaagactgcgttggagatgctcaggaccagcatgtacatagaagacagcttgtcacaggtgacgctgccgttcttcgtcctgcacggcgaggccgacacggtgacggacccggaggtgagccgcgcgctgtacgagcgttcggccagcgccgacaagaccatcaagctgtacccggggatgtggcacggcctcaccgccggggagcccgacgagaacgtggaggccatcttctccgacatcgtgtcctggctcaaccaccgcagccggagctgggccgtggaggaacgccatatgaccaggaagctggcgccagctccggccaagtccatcgaaggccacggcaccgtggacggcaaagtgcacacacaacaagggcgccctcggcggcgccagggcttcctctgcgggcttgccggccggacgcatcaccacgcggagatgtgaaagatagaatcgccgtctcggtcccggatcagatgggcgcctgctttcttcaaccatggcaaataaaggaatgatgacctgcggtttataatatagaggtcttattatgcttgtcaaagttatgtatgaccaatcattcccagtctggtgcagattcaaactcatgctcagatatatgtaatgtaagattataacgctattagcattctggataacccgtt

SEQ ID NO: 4466 - DNA, 2251 bp, Sorghum bicolor
ggcaaccgcagcggatcccccatatcctgagactgagtcctgacggacgcccacgtcgcacctcgtctccctgtctatacagcccgggccgcgttcatacggcacgtgttgcgcctcctccacacgcttcccgtcggtctccctcccaccgcttccatcgtcttcctcctccccctcctcctcgatctctctgctagcgacatctctagctgcgcatgcatgcgctctctctgtgacattcattcctccctgcgtattgctgccgtctgattcttctccaagctctgatatactgtattcgaggaggggttacggccggattattagctgcagcctgcagaagatgatggacgtggtctaccatgaggagtacgtgaggaacccgaggggcgtgcagctcttcacctgcggctggctgccgccggcgtcctcctccccacccaaagcgctcgtcttcctctgccatggctacgggatggagtgcagcgacttcatgagagcatgtgggatcaagttggccacagcagggtatggtgtgtttggcatcgattatgagggccacggcaagtccatgggcgccaggtgctacatccagaagtttgaaaacctcgtggctgactgcgacaggttcttcaagtccatctgtgatatggaggaatacagaaataaaagccggtttctgtacggcgagtcgatggggggagccgtggctctactactgcacaggaaggatccgaccttctgggatggtgcagttcttgtggcgccaatgtgcaagatttcagagaaagtgaaaccgcacccggtggtggtcaccctcctgactcaagtggaggagatcatcccaaagtggaagatcgtccccaccaaagacgtcatcgactcggcattcaaggaccccgtcaagcgcgaaaagatcaggaagaacaagctcatctaccaggacaagccccggctgaagacagctctggagctgctcaggaccagcatggatgtggaagatagcctgtcagaggtgacgatgccattcttcatcctgcacggcgaggccgacacggtgaccgacccggaggtcagccgcgccctctacgagcgcgccgccagcaccgacaagaccatcaagctgtaccctgggatgtggcacggcctcaccgccggcgagcctgacgagaacgtggagctggtgttctccgacatcgtctcgtggctcgacaagcgcagtcgccactgggagcaagacgagcgggcaaggactccaccggagcctgagaacaagcaccgccaggcggcgaccaccaaaatcacacgcgttaccagcagcagtggcggcaccgagagtcagcggcgcggcagctgcctctgcggactaggcggtcgaccacaccagcaacagtgtaggatgtagtagacatggaaaacacttgttctttattcagttgttgataaagaactgtacattggcataagaaacaagcctgacactgacagtgaatgaaataaaaagatgtcatcttgtttcatcttcagaactgtttgtttgtttctttgttctagtctagtttatgagagcagggtaggcatcctctgcgtttcaacaaagaaacggaccacacatcaaagcaggcatacataacacttgcagaaaccgtgatttataccatatatatgatgctatgctctcaatcaacaaagaattagatcatccgggtttatctccaacggttcaactgaaatttttttgtatagctaaggactgagagaactgagaaaaaaaatacaggaaaaagaatagcattacagcatcaaccaaggtatttcagtaacacattcccaacgaactacgtggccatagcttttgtcagtataaggagagcgaccaagcaggctagaagcaggccaccaaaaacttcccaagtatcgtgcggcttcatcctaaccttgctggtttccagtggtggcggcggcgtcttggtcgccaaagatgcgcttgcggaagtcactgaccatgaggggaaggccctcgcggagggggatcttcggctcccacccaaggagctccttggcacggctgatgtcgggcttgcgcttgtgtgggtcgtcctgggtgttctgacggaactcgatctgtgcattggggtcgatggtgtcctggacaaccttggcaagctcaagcatggtgaactcgccggggttacccaggttgaatggtcctacatggtcgccttccatcagcttcatcagaccctcaacc

SEQ ID NO: 4467 - DNA, 1532 bp, Hordeum vulgare subsp. vulgare
ggcagacgtttgctgggcacgtgttccctctcgtcgacacgcctttccccctctcgcctcccttcttcccctcgcattcccctcatctcatcaaacctcctcccctacctctctctaccgcttctctgtgatctggtctgcttatctgctactgcttccctgtgatctccggctctgtcaaaaattgtgcccccgcgaccgcaagctcgccgctttgatccccgcttacttctcgcgcatatacatacagaagggtctatacaatcaggaggaagatggaggtggaataccatgaggagtacgtgaggaatccaaggggggtgcagctcttcacatgcggatggctgcctgcttctgcctcgcccaaggcgctcgtcttcctttgccatgggtatggcatggaatgcagcgtcttcatgagagcatgcgggttcaagttggccgcggcggggtacggcgtgttcggcatcgactacgaaggccatggcaagtccatgggcgccagatgctacatccagaagttcggccgcctcgtcgccgactgcgaccgcttcttcaagtccgtctgcgacatggaggagtaccggagcaagagccggttcctctacggcgagtcgatgggcggcgccgtcgccctgctgctgcaccgcaaggacccggccttctgggacggcgccgtcctcgtggcgcccatgtgcaagatatcggagaaggtgaagccgcatccggtggtggtgaccctcctgacgcaggtggaggagctcatcccgacctggaagatcgtccccaccaaggacgtcatcgactccgccttcaaggaccccctcaagcgcgaaaagatcaggaagaacaagctcatctaccaggacaagccgcggctcaagacggcgctggagctgctgaggaccagcatggacgtcgaggtcggcctgtccgaggtgaggatgcccttcttcgtcctgcacggcgaggccgacaccgtgaccgacccggaggtgagccgggcgctgtaccagcgggccgccagcgccgacaagaccatcaagctttacccggggatgtggcacggcctcaccgccggcgagcctgacgacaatgtggagctggtctttgccgacatcgttgcctggctcaacaagcgatgttatcaccgcaggcctgaacacgacccggtaagaagcgcgccggcggagcctacccggtaccaacggccagagttcgacggcgcggacagcccggtgtcgatacctcggcggcgaggccgcttcctctgcgggcaatgtagaatgtagacatggaacttgtcactccacataaggaaaaggaagcagcaggtgaaagcatgtagatagtgggctgcatgaatgctcaataaactgaatgaaattttgctccactctgaagttttcttgtgttctcgggagacattagcttcctggagcagacggacagatgcacatttctgagagaacatgtaatttgtaccatataactctatcatctcaacaaagaattagaagatccagatttat

SEQ ID NO: 4468 - DNA, 1526 bp, Hordeum vulgare subsp. vulgare
gggggcacgtgttccctctcgtcgacacgcctttccccctctcgcctcccttcttcccctcgcattcccctcatctcatcaaacctcctcccctacctctctctaccgcttctctgtgatctggtctgcttatctgctactgcttccctgtgatctccggctctgtcaaaaattgtgcccccgcgaccgcaagctcgccgctttgatccccgcttacttctcgcgcatatacatacagaagggtctatacaatcaggaggaagatggaggtggaataccatgaggagtacgtgaggaatccaaggggggtgcagctcttcacatgcggatggctgcctgcttctgcctcgcccaaggcgctcgtcttcctttgccatgggtatggcatggaatgcagcgtcttcatgagagcatgcgggttcaagttggccgcggcggggtacggcgtgttcggcatcgactacgaaggccatggcaagtccatgggcgccagatgctacatccagaagttcggccgcctcgtcgccgactgcgaccgcttcttcaagtccgtctgcgacatggaggagtaccggagcaagagccggttcctctacggcgagtcgatgggcggcgccgtcgccctgctgctgcaccgcaaggacccggccttctgggacggcgccgtcctcgtggcgcccatgtgcaagatatcggagaaggtgaagccgcatccggtggtggtgaccctcctgacgcaggtggaggagctcatcccgacctggaagatcgtccccaccaaggacgtcatcgactccgccttcaaggaccccttcaagcgcgaaaagatcaggaagaacaagctcatctaccaggacaagccgcggctcaagacggcgctggagctgctgaggaccagcatggacgtcgaggtcggcctgtccgaggtgaggatgcccttcttcgtcctgcacggcgaggccgacaccgtgaccgacccggaggtgagccgggcgctgtaccagcgggccgccagcgccgacaagaccatcaagctttacccggggatgtggcacggcctcaccgccggcgagcctgacgacaatgtggagctggtctttgccgacatcgttgcctggctcaacaagcgatgttatcaccgcaggcctgaacacgacccggtaagaagcgcgccggcggagcctacccggtaccaacggccagagttcgacggcgcggacagcccggtgtcgatacctcggcggcgaggccgcttcctctgcgggcaatgtagaatgtagacatggaacttgtcactccacataaggaaaaggaagcagcaggtgaaagcatgtagatagtgggctgcatgaatgctcaataaactgaatgaaattttgctccactctgaagttttcttgtgttctcgggagacattagcttcctggagcagacggacagatgcacatttctgagagaacatgtaatttgtaccatataactctatcatctcaacaaagaattagaagatccagatttatatatcc

SEQ ID NO: 4469 - DNA, 1666 bp, Oryza sativa Japonica Group
ggttgcgtctcctccacacgctagcgagtagctatacaacgtacctttcccttcctcttgctcctcctcgtcgtcgtcttgctcgtcctgcctgatcaatctttctcgctcttatctcctctcatctctcaatctctctcagataattaaaccaagtgtgcagatagatatatagctgctgctgcatgtgtagggattgcctctgacatattactattccttgcatgcgaaagagagactagctcttgtcactctcctctgcccttcttccttcgattcaagaaggcacagtagtgtgtatatatatacaggcatacataccgttcttgccgcctctagtttgggtgtgattgaatgacaaaggagatggccgatgatgtcgagtaccatgaggagtttgtgacgaatccgagggggttgcggctcttcacatgcggctggcttcctgcttcttcctcccccaaggcgctcatcttcctttgccatggctacggcatggaggtcagtggcttcatgaaagcatgtggggtcgagctggccacggcgggttacggcgtgttcggcatcgattatgaggggcatggcaagtccatgggtgccagatgctacatccagaagttcgagcatcttgtcgatgactgcgacagattcttcaaatcaatatgtgagctggaggagtacagagacaagagccggttcctgtacggggagtcgatgggcggcgcggttgcgctgctgctgcaccgcaaggacccaaccttctgggacggcgccgtcctcgtcgcgccgatgtgcaagatatcggagaaggtgaagccgcatccgttggtggtgacgctcctgacgcaggtggaggagatcatccccaagtggaagatcgtccccaccaaggacgtcatcgactctgccttcaaagaccccatcaagcgcgaaaagatcaggaagaacaagctgatctaccaggacaagcccaggctgaagacggcgctggagctgctgcgaaccagcatcagcgtcgagcaaagcttgtcacaggtgagcatcccgttcttcatcctgcacggcgaggccgacaaggtgacggacccggaggtgagccgtgcgctgtacgagcgcgccgccagcgccgacaagaccatcaagctctacccggggatgtggcacggcctcaccgccggcgagccggaccacaacgtccacctcgtcttctccgacatcgtcgcctggctcgaccgccgcagccaccgccaggacagggcgagcattaccccgccggcggcctgcaccgacagcgccgccgccgctgcggcggacagcccagtgtcgcctgagccgccgcggcaaggcgccgccggcggcttcctctgcggcctaaccggccgagcaaatccccagcaatgtaggatgtaaaatatagaaagaggggaaaaaaaaagaactcccttgatatacaaaatgaaaggaatgcagatgttgtgatgcaaacagtgtcatgaacaagttcagagaaatttttagtttcatcagaacagtttctgtttgtttcagtttgaacatgcaccagctgcctgcctagagcgagcagcctggcaaaatacaaatttctgagagaacatgtaatttataccatataatgctatcatctcaacaaagaatcagaagatcc

SEQ ID NO: 4470 - DNA, 1114 bp, Sorghum bicolor
ggttcttcttgttggctcgcacaccaccatccaccagcacctgcacggcgacagacagcgagcagacatggaggtcgaataccacgaggagtacgtgcggaactcgagaggagtgcagctcttcacctgcggctggctgcccgtcgccacatcgcccaaggcgctcgtcttcctctgccacggctacggcatggagtgcagtggcttcatgagagaatgcggcatgcggctggcggcggccgggtacggcgtgttcgggatggactacgagggccacggcaagtccatgggcgcccgctgctacatccgcagcttccgccgcctcgtcgacgactgcagccatttcttcaagtccatctgcgagcttgaggagtaccggggcaagagccggttcctgtacggcgagtccatgggcggcgcggtggcgctgctgctgcacaggaaggaccccgccttctgggacggcgccgtgctcgtcgcgccgatgtgcaagatatcagagaaggtgaagccacaccctgtggtgatcacgctcctgacgcaggtggaggacgtgatcccaaagtggaagatcgtgcccaccaagcaggacgtcatcgacgccgccttcaaggaccccgtcaagcgtgaaaagatcaggagaaataagctgatttaccaggacaaaccgcggctcaagactgcgctagagatgctcaggaccagcatgtacatagaagacagcttgtcacaggtgaagctgccgttcttcgtcctgcacggcgaggccgacacggtgacggacccggaggtgagccgcgccctgtacgagcgcgcggcgagcgccgacaagaccatcaagctctacccggggatgtggcacggcctcaccgctggggagaccgacgagaacgtggaggccgtcttctccgacatcgtctcctggctcaaccagcgctgccggagctggaccatggaggaccgcttcaggaagctggtgccagcgccggccaagttcatccatggtgacgacgccgtcgacggcaaagcgcagacacaagggcgtcctcggcggcggcgtccgggcctcctctgcgggcttgccggccggacgcatcaccatgcagaaatgtga

SEQ ID NO: 4471 - DNA, 1365 bp, Sorghum bicolor
atgaccgcccattccgagcacccgccgtcaccggcggaaccgcccgcccccaccaccatacgtgacctctccgacgacctcctgcgcgagatcctcctccgcctcccgtccctcccttcgctcgtccgcgccgccctcacctgccgcgccttcctggccgccgtccgctcctcccccgccttccgcctccgcttccgagcgctgcactcgccccctctcctcggcttcttcttcgaccccgacggcaacgaaaaccccaccttcacgcccatccgccgcggctccgatcgggaccacgcggccgccgtccgcggcctcgacgtcttcctcacccgcgtcccgcaccaggacgacgacgacgtcttccccggatggcaggtaatggagtgccgcgggggctgccttctcctcctcaactggaaaaccaagcagctcgccgcctacaaccccctcacgggcgccttggatctcgtccccaagctccccgacgagatctccaaaggacaccgcggcaagttcatctccggtgatttcttcctggtcgtccccgacgacgaggctcccgataggcgttcgttccgggtgatcgcctcctgccacgacaagtctcgggtgcgcatcgccgtcttctcatcggccaccaggaagtggcagattctcccctggtcggagcctgtgccgacacagccggcgagcggcaagtattggcttctctcggggaagcaggtgaatgggttcctgtgctggtcacaccataagaatgcctacaaggtgttgctggacacggcgacgctgcaattctccttcatcgatctgccggatggcttgagtgggcaaggccacctctacaggactggggataccaaggatgggaagctctgcatcgtggccgcgatcgatttcacgctattcgtctggttccggacaccagatgctgatggtgttgacaagtgggtgcttcaaaatgtgttgcagttggaggaagaggttcttgaggccaccgagggctcattggatgaacttgaacagctgaaagtgtttgcaattcgggacggcattgtgtacatgacgacatttgagacatttagagatgctacattgccttgctggtacctatccttctgcctggaaacaaggaagctggaaaagctcttttatgtaaaagctgatggtcatgctcatccctacttcatgccatggccaacttctttagtagcaataaaatcattgccccaccctgatgtcgtggtacaccgcttgatattttttatgcagaaatggagcatcctgctgaaggagatagagaagtttggcaatgacgatgacagagagattatcacgagacttggtgcaatcaagagctga

SEQ ID NO: 4472 - DNA, 1388 bp, Zea mays
agacgtcctctgtccatggcctcccatcctgagcacccggcggaaccgcgagcaccgcccgccccaacgaccataggcgatctctccgacgacctcctgcgcgagatcctcctccgcctcccttcccttccttcactcgtctgcgcctccctcagctgccgcgccttcctggccgccgtccgctcctcccgcgccttccgccgccgcttccgcgcgctgcacccgcctcctctcctcggcttcttcttcgaccccgacggcaacgaaaatcccaccttcatgcccattcgccgcggctccgaccggggccacgcggccgccgtccgcggcctggacgccttcctgacccgcgtcccgcacgaggacgacgtcttccccgggtggcagataatggagtgccgcggcggctgccttctcctcctcaactggagaaccaagcagctcgccgcctacaaccccctcacgggggccttggatctcgtccccaaactgcctgacgacatctgcaaagggcaccgcggcaagttcatctccggtgattttttcctggtagtccccgacgacgaggctcccgacaggcgttcgttccgcgtggtctcctcctgccacgacaagtaccgggtgcgcgtcgccgtcttctcgtctgccaccaggaagtggcagattctcccctggtcggagcctgtgccgacacagccggcgagcggtaagtactggcttctctcggggaggcaggtgagtgggttcctgtgctggtcacaccataagaatgcctacaaggtgttgctggacactgcgaccctgcaattctccgtcatcgatctgccgtatggcttgagtgggcaaggtcacctctacaggactggggataccaaggatgggaagctctgcatcgttgccgcaatcgatttctcgctgttcgtttggttccggacaccagacgccggtggcattgacaggtgggtgctccgacatgtattgcagctggaggatgaggttcttgaggccaccgagggctcacggaatgaacttgaacagcttaaagtgtttgcaattctggacggcatcgtgtacatgacgacatttgagacgtttagagatgctaccttgccttgttggtacctatccttctgcctggaaacaaggaagctggaaaaactcttctatgtaaaagctaatggccatgctcatccctacttcatgccatggcctactgctttagtaggtaacaatttgagcccctgactaggaggaggtgcttgttcaagtgaaactggttacagtaacatgtaagtttcttgttctgtctagactcaacagtttgttcacttatcctcttatatactagtaacgggtgcgcgctttgcgtggcaaaaaaaaaaaaaaaa

SEQ ID NO: 4473 - DNA, 1461 bp, Zea mays; identical to SEQ ID NO: 1112

SEQ ID NO: 4474 - DNA, 1613 bp, Zea mays
catctctcgccttccatataacgagcgatcatcgtcaaggatcggtcggcgcgcgcgcgaggccaacggccggctggggttttagcttgctgctggcgccaggctatcccggcatggcgaagcagtcgtgctgccacaagaagaagcttaggagagggctctggtcccccgaggaggacgagaagctcatgaaccacattgccaagtacggccatggctgctggagctccgtacccaagcttgcaggcctcgacaggtgtggcaagagctgcaggctgaggtggataaactacttgaggccagacctcaagaggggcacattctcgcaagaggaggaggacctcatcatacacctccactccttgctgggaaacaagtggtctcagattgcggcccagctgcctggccggacggacaacgaggtcaagaacttctggaactcgtacatcaagaagaggctcagggagcgcggcatcgaccccgccacccaccagccgctcgccgagcctgccgcggccactgccgccgccgccgtcaccaccaccactacggtctcccgccgctcggtgtttggggacgtcgacctcatcccgactactgctactactacaatccaccaggcgccgccgccgtcgttcgagggcggctcaatgctggacggcgtgaagctagcggtggagctggactggcccgtcgcgggcgacggggtaacgtcaaggccatgctacctgcaggggggctgcttcgacatggacgcgctgcagcagcactgcggctccatgtccatcccgccggcgccggtcgtcccgtcggcctccgccagctccagcacgctgacctcgatggcggaagccgaacactgcagcaccaacaacgtcgccgccggcggcaacctcccatggctggatctcggggcaaacgcggtggctggcgccggcggccacgtcgtcggcagctgctacgccggcgcgctggacgagctcaggtggttggagtacttcgacagtgccttccaggccgccgagagccagcaaggcgccctgcagccggggcagtgtgtctacggcggcaaggatgacgtccccgtgcacttcgacgtccatggcgggctaagcaactggtgctagtccagtaatccatcacgtactcaatgcaaagaaaccacggaacaagaaacagtccagtgtgaattaattactgtctatatatagtctgcagatgcaaattcttacgggcatttcatctggtgttacccctcccccttcctattctcatgttgctgtgttgattagcagcggataaaagttcatgtgatgagtacatttgaagtgtttaacacacatgtaaagtaatacatacgctgttgttaattagtaaatactgcagagagagagagagagagagagagagagagagagagagagagatagagagggacagagatatgatgagtgggccatgcggttaaataaaaatgtgaattattatgtcattatctcagcatattaattatagcatgcatgcatgcacggattaatttgactttaaaaaaaaaaaaaaaaaaaaaaaaaaaaaaaaaaaaaaaaaaaaaaaaaaaaaaaaaaaaaaaaaaa

SEQ ID NO: 4475 - DNA, 1488 bp, Sorghum bicolor
gctgccaccatcgtcatatctcggcttccatacaacgatcgacgaccgtcgtcgtcgtcaaggggatcggttagtcgttggcgccgcagagcgcgacgccgacgccaaccgatccatctatcgacgacatcctacgtacgggcttgcctgtgccatggcgaagcagtcgtgctgccacaagaagaagctgaggagagggctctggtcccccgaggaggacgagaagctcatgaaccacattgcccagtacggccatggctgctggagctcagtgcccaagcttgcaggactcgagaggtgtggcaagagctgcaggctgaggtggataaactacctgaggccagacctcaagaggggaacattctcacaagaggaggaggacctcatcatacacctccactccttgctgggaaacaagtggtctcagattgcggcgcagctgcctggccggacggacaacgaggtcaagaacttttggaactcgtacatcaagaagaggctcagggagcgcggcatcgaccccgccacccaccagccgctcgccgagcctgccgcggcgacggcgccggccagcaccaccaccgtcagccgccgcgccgtgtttggggacgtcgatctcatcccgaccactacaccaatccaggcgccgtcgtcgttcgaggggccaatgctggacggcgtgacgaagctcccggccgtggacatggactggcccgtccccggcgacggggtgccgtcttcgtcgctgccaaggccgtgctacctgcaggggggctgcttcgacatcggcgcgctgcagcagcagcagcactgcggttccatcgtcccggcgccggtcgtcccgtcggcctcgagctccagcacgctgacctcgatggcggaggccgaacactgcaacaccaacatcaccggcggcagcctcccgtggttggagctcggagcaaacgcggtggctgacgccggccacgtcgacagctgctacgccggcgcgctggacgagctcaggtggtcggagtacttcgacagtgccttccaggccgccgcgagccagcaaggcgcactgcaggcggcggggcagtgtgtctacggcggcaaggatgacgtcccggtgcacttcgacgtccatgggctaagcaactggtgctaatgcatcactttcactgtgtgctaatgcaagaacccacggaagaagaaacagttcgcagatgcaaattattattactcgcatttcatctggtgttattttccccacttcttattctgatgttgctgttgatgagcagcggataagttcgagagtgtggtgagtacatttgaagtgtttaacacacatgtaaagtacatatacgatacgctgtggttaattagtaaatactgcagagagagagagagagagagagagagagagagagagagatgaacgggccatgtggttaaataaaaatgtgaattattatgtgattagctcagcacattatatacatgtgc

SEQ ID NO: 4476 - DNA, 2421 bp, Zea mays; identical to SEQ ID NO: 1089

SEQ ID NO: 4477 - DNA, 1548 bp, Sorghum bicolor; identical to SEQ ID NO: 1113

SEQ ID NO: 4478 - DNA, 1696 bp, Zea mays
ccgacacgcgcccggcaggcaccgagccgctgtgtaacgacgagcgagaatggtggccacgaagccgcgggtcgccgtagtcggcgcaggcgtggccgggctcacagcggcgcaccggctctgcgccgcaggcggcgagaggttcgaggtgacggtcgtagaggccggcgcccgcgcgggcgggcgggtgctcacgtccgagttcgccggccaccgcgtcgagatgggcgccacgtgggtgcagggggtcgatgggagccccgtgtacgcgctcgcgcgcgacgccggcgcgctcgcctgcggcaaggaccttcccccgtacgagcgcatggacgggttccccggccgcgtgctcacggtcgccgagggcggcgaggaggtcgacgccgaccgggtggccagtccgatcgaggagctgtacaggggcatgatggaggccgcgcgcgccggcgaggccggcggcggaggtggcgtcgaggagtacctgagtcgcggcctccgagcgttccaggcggcgcgaccgggcggcggcaaggagctggaggaggtcgaggacgcgctgctcgccatgcacatcaaccgggagagggcggacacctccgccgacgacctcggcgacctcgacctcgccaccgagggcgagtaccgcgacttccccggcgagcacgtcacgatccctgccgggtactcccgcgtcgtggaccacctcgtcgcggcgctcccgccggataccgttcgcctcggcctccgcctccgccgcctcgactggagcgagacccccctgcgacttcacttcgacgatggcgcgacggcgatctccgccgaccacgtcatcctcacggtgtcgctgggcgtcctcaaggcgagccttggtaaggacgcccacgccgcgggcggcatcgccttcgacccaccgctcccgcagttcaagcgcgaggccgtcgcgaggctcggcttcggcgtcgtgaacaagatgttcatggagctggaggccgtgccagcggcgagaccggaaggcgaccgaggtggcggcggcgagcacccgctagccgcgtctgcgccaccggagttcccgttcctacacatggctttccgggggcacgtgtcggagatcccgtggtggatgcgtggcaccgagtcgatctgccccgtccacgcgggctccagcgtggcgctggcgtggttcgccgggcgggaggccgagcacctcgagtctctccccgacgacgaggtcatccgcggggtacactccacgctggactccttcctcccggccccgtcacggtggagggtgaagcggatcaagaggagcgggtgggccacggaccagctcttcctgggatcctacacctacgtgcccgtcgggtccagcggcgaggacctcgaccggatggccgagccgctgccacgccggttggacgccgacgtcgacgttgcccgcgcgccgccgccccgcgttctgttcgccggcgaggcgacgcaccggacgcactactcgacgacgcacgccgcgtacctgagcggtgtgagggaggccgagcggttgctgcagcactacgcttaggttgcagacttgcagttgcaggtgcgttcgtaattgcaccgacgagtcgaggtgacgcgtcagcgtcatatcctaggggattttgccctgtgttcttgctgtgtgctagactgctaaggtatatggatttgg

SEQ ID NO: 4479 - DNA, 1539 bp, Oryza sativa Japonica Group
atggtggcgaagaagccgagggttgtggtggtgggcgcggggatatcgggcctcgcggcggcgcaccggctgtgcggcgcgggcggggacaggttcgaggtggcggtggtggaggccggcgaccgagtcggcggccggatcctcacgtccgagttcgccggccaccgggtcgagatgggcgccacgtgggtgcagggcgtcgtcgggagccccgtgtacgctctggcgcgcgacgccggcgcgctcggggaggaggagggtcgtggtctcccgtacgagcgcatggacggcttccccgaccgcgtgctgaccgtcgcagagggcggcgaggtcgtcgacgcggacacggtggctggcccgatcgaggagctgtacaggggcatgatggaggccgcgcgcgccggcgaggctggtggtggaggcggcgtggaggagtacctgcgccgtggcctacgggcgtaccaggcggcgcggtctgccggcggcggcggcggcggcggcaaggagcttgaggaggtggacgaggcgctgctcgccatgcacatcaaccgggagcggaccgacacctccgccgacgacctcggcgacctcgacctcaccgccgagggcgagtaccgcgacttccccggcgaacacgtcacgattcccggcggctactcccgcgtggtcgagcgcctcgccgctgcgctcccgcccggcaccgtccgcctcggactccgtctccgccgtctcaagtggggcggaacccctgtccgcctccacttcgcggatggcgcgccgccgctcaccgccgaccacgtcatcctcacggtctcgctgggcgtcctcaaggccagcctcggcaacaaggacaccgccggcgttggcgcggccgccatcgccttcgacccgccgctcccgcctttcaagcgcgaggccgtcgcgcgcctcggcttcggcgtcgtgaacaagctgttcatggaggtggaggccgtggcgccatcggaaccggaggacgtcgccggcgtgcagccggcggcggcgggcttcccgttcctgcacatggcgttccggggacacgtgtccaagatcccgtggtggatgcgcggcacggagtcgatctgccccgtccacgcgggctccaccgtggcgctggcgtggttcgccggccgggaggcggcgcacctcgagtccctccccgacgacgacgtcatccgcggggcccacgccacgctggactccttcctcccggcggcgccacggtggagggtgaggaggatcaagcggagcgggtgggccacggacccgctcttcctcgggtcatacagctacgtggccgtcggatcgagcggcgacgacctcgatcgcatggccgaaccgctgccacgtgggccagacgccgccgccgacgagcggccgccgtcgccgcggctgctgttcgccggcgaggcgacgcaccgcacgcactactcaacgacgcacgccgcgtacctgagcggcgtgcgcgaggctaaccggctgctgcaacactaccgcggcggagcgaatcacaccacgtag

SEQ ID NO: 4480 - DNA, 1822 bp, Hordeum vulgare subsp. vulgare
gcgttcatttttgtgaaggaaagtcacctctgaattcccttctcaacgacagaggatcaggctccgggagtgacaactgaccagtgcgaaaacgtcggcgagccgcgggcgcggcaggcgaggatggttgagaagaagccgcggattgtcatagtgggcgctggcatagccggactctcggcggcgcagcagctatgcggcgccggccgggaaaagttcgaggtggtggtggtggaggctggctgccgcgctggcggccgggtgttcacgtctgagtttgccgaccatcgtctcgagatgggcgctacgtgggtgcaggggatcctcgggagccccgtgtacgcactggcgcgggaagcgggcgcgctccgggaggaggccgcagacctcccgtacgagcgcatggacgggttccctgacggcgtcctgactgtcgccgagggcggcggcgtcgtcgatgccaacacggtggccaagccgatcgaggagctgtacaggggcatgatggaggctgcgcgtgccggtgaggctgtcggcgaagggggcggtgtggaggagtacctgcgccgggggctgcgagcgtaccaggcgaggcgcccgggcgggcgcaaggagctggaggaggtcgaggaggcgctgctcggcatgcacatcaaccgggaacgcacggacacctccgccgacgatctcggcgaccttgacctcccggctgagggtgagtatcgcgacttccccggcgaccacgtcacgatccccggcgggtacacccgcgtggtggagcacctcgtggccgcgctcccgcccggcactgtccggctcggcctccgcctccgtcgtctcgactggggcgaaacacctgtgcgcctccacttcgccggcgaggcgacgacgacgctcaccgccgaccacgtcatcctcacggtctcgctgggcgtcctcaaggcgagcatcggcaaggacgtgtccgctacggctacgggcgcaatcgccttcgacccgccgctcccgcagttcaagcgtgaggccgttgagcggctgggattcggtgtcgtggacaagctgttcatcgaggtggaggccgtggagacgccggaaccggacggcggctacgcgcagctagccaggacggcccagccggctttcccgttcctgcacatggcgttcctcggagacgcagcgaagatcccgtggtggatgcgcggcaccgagtcagtgtgccccgtccacgcgggctcgacggtggcgctcgcatggttcgccgggcgggaggccgcgcacctcgagtcgctccccgacgacgaggtcatcagcgcgctccaatccacgctggaatcctttctcccagcccaacctcgccgctgcagctgggcaggcgcgggggcgaccccacggtggagggtgaagagaatcaagaggagcgggtgggcggcggacccgctcttcctcgggtcctacagctacgttgctgtcgggtccagcggcgaggatctcgatcggatggctgagccgctaccacgcggaccggaggccgacaggacgccgctgcgcgtgctgttcgccggcgaggcgacccaccggacgcactactcgacgacgcacgcggcctacctgagcggcgtacgggaggccgaccggctgctgcagcactactgctgaggttttattttggatatttttttcctagacgggtgtgaccagcgatacggctgtagttcattttgcttgttttgatttcccgtccgtagctcatttccggggaagtggctagggaagttattgttgcgaaaatttggaggatttaatatggaaagtgcccgcgtcg

SEQ ID NO: 4481 - DNA, 1772 bp, Zea mays
gaagaacacccttctctggtcgtcgcagggcagctaacatccgccatggcgcgcgggggagacggcctgcaggtgctgagcgcgctggacgcggcgaagacgcagtggtaccacttcacggccatcatcgtcgccggcatgggcttcttcacggacgcctacgacctcttctgcatctccctcgtcaccaagctgctgggccgcatctactacacggacaccagcaaggacagccccgggtcgctgccgcccaacgtcgcggcggcggtcaacggcgtggccttctgcggcacgctggcggggcagctcttcttcggctggctgggcgacaagctggggcgcaagagcgtgtacgggatgacgctcatggtcatggtcatctgctccgtcgcgtcgggcctctcgttcggccacacccccacgggggtcatggccacgctctgcttcttccgcttctggctcggcttcggcatcggcggcgactacccgctgtcggccaccatcatgtccgagtacgccaacaagaggacccgcggcgccttcatcgccgccgtcttcgccatgcagggcttcggcatcctcgccggcggcatcgtcacgctcgtcatctccgccgccttccgcgcggcgtacccgtccccggcgtacagggacgaccacttcacctccaccgtgccgcaggccgacttcgtgtggcgggtcatcctcatgctcggcgccgcgccggcgctgctcacctactactggcggatgaagatgcccgagacggcgcggtacacggcgctggtggccaagaacgccaagcaggccgcggccgacatgtccaaggtgctgcacacggagatcctggacgagcaggagaagctggacgggatggtcgccgccgagggcgccaacagcttcggcctcttctccagggagttcgcgcgccgccacggcctccacctcgtcggcaccgccaccacctggttcctgctcgacatcgccttctacagccagaacctgttccagaaggacatcttcaccagcatcaactggatccctaaggccaacaccatgagcgcgctggaggaggtgtaccgcatctcccgcgcgcagacgctcatcgcgctctgcggcaccgtcccgggctactggttcaccgtcgcgctcatcgacgtcgtcggccgcttcgccatccagctgctgggcttcttcatgatgaccgtcttcatgctcggcctcgccatcccctaccaccactggaccacgccgggcaaccacatcggcttcgtcgtcatgtacgccttcaccttcttcttcgccaacttcgggcccaacagcaccaccttcatcgtgcccgccgagatcttcccggcgcgactgcgctccacctgtcacggcatctccgccgcctcggggaaggccggggccatcatcggcgcgttcggcttcctgtacgcggcgcagaaccaggacaagagcaagacggacgccggctaccccgcgggcatcggcgtgcgcaactcgctcttcgtcctcgccgccagcaacatgctcggcttcgtcctcacgttcctcgtgccggagtccaagggcaagtcgctcgaggagatgtctggtgaggctgaagactcagaggaggagcccgtcggcgcccgtgcggtgcggccgtcggagacccagatggtgtagagaatcgatcgatcgacgcgtgttccttcctgcactgcacatggtgggctatcatgtcctcaattgtttttttccacgttaaaaaaaaaaaaaaaaaa

SEQ ID NO: 4482 - DNA, 1795 bp, Zea mays
cccgaagaacacccttctctggtcgtcgcatcgcagggcagctagctaggtagctaacatccgccatggcgcgcgggggagacggcctgcaggtgctgagcgcgctggacgcggcgaagacgcagtggtaccacttcacggccatcatcgtcgccggcatgggcttcttcacggacgcctacgacctcttctgcatctccctcgtcaccaagctgctgggccgcatctactacacggacaccagcaaggacagccccgggtcgctgccgcccaacgtcgcggcggcggtcaacggcgtggccttctgcggcacgctggcggggcagctcttcttcggctggctgggcgacaagctggggcgcaagagcgtgtacgggatgacgctcatggtcatggtcatctgctccgtcgcgtcgggcctctcgttcggccacacccccacgggggtcatggccacgctctgcttcttccgcttctggctcggcttcggcatcggcggcgactacccgctgtcggccaccatcatgtccgagtacgccaacaagaggacccgcggcgccttcatcgccgccgtcttcgccatgcagggcttcggcatcctcgccggcggcatcgtcacgctcgtcatctccgccgccttccgcgcggcgtacccgtccccggcgtacagggacgaccacttcacctccaccgtgccgcaggccgacatcgtgtggcgggtcatcgtcatgctcggcgccgcgccggcgctgctcacctactactggcggatgaagatgcccgagacggcgcggtacacggcgctggtggccaagaacgccaagcaggccgccgccgacatgtccaaggtgctgcacacggagatcgtggacgagcaggagaagctggacgccgccgagggcgccaacagcttcggcctcttctccagggagttcgcgcgccgccacggcctccacctcgtcggcaccgccaccacctggttcctgctcgacatcgccttctacagccagaacctgttccagaaggacatcttcaccagcatcaactggatccccaaggccaacaccatgagcgcgctggaggaggtgtaccgcatctcccgcgcgcagaccctcatcgcgctctgcggcacagtcccgggctactggttcaccgtcgcgctcatcgacgtcgtcggccgcttcgccatacagctgctgggcttcttcatgatgaccgtcttcatgctcggcctcgccatcccctaccaccactggaccacgccgggcaaccacatcggcttcgtcgtcatgtacgccttcaccttcttcttcgccaacttcgggcccaacagcaccaccttcatcgtgcccgccgagatcttcccggcgcgcctgcgctccacctgccacggcatctccgccgcctcggggaaggccggggccatcatcggcgcgttcggcttcctgtacgcggcgcagaaccaggacaggagcaagacggacgccggctaccccgcgggcatcggcgtgcgcaactcgctcttcgtcctcgccgccagcaacatgctcggcttcgtcctcacgttcctcgtgccggagtccaagggcaagtcgctcgaggagatgtccggtgaggctgaagactcagaggaggagcccgtcggcgcccgtgcggtgcggccgtcggagacccagatggtgtagagaatcgatcgatcgacgcgtgttccttcctgcactgcacatggtgggctatcatgtcctcaattgtttttttccacgttaaagtcaaccctggctgtgttttgatgtgc

SEQ ID NO: 4483 - DNA, 1770 bp, Zea mays
ttctctggtcgtcgcatcgcagggcagctagctaggtagctaacatccgccatggcgcgcgggggagacggcctgcaggtgctgagcgcgctggacgcggcgaagacgcagtggtaccacttcacggccatcatcgtcgccggcatgggcttcttcacggacgcctacgacctcttctgcatctccctcgtcaccaagctgctgggccgcatctactacacggacaccagcaaggacagccccgggtcgctgccgcccaacgtcgcggcggcggtcaacggcgtggccttctgcggcacgctggccgggcagctcttcttcggctggctgggcgacaagctggggcgcaagagcgtgtacgggatgacgctcatggtcatggtcatctgctccgtcgcgtcgggcctctcgttcggccacacccccacgggggtcatggccacgctctgcttcttccgcttctggctcggcttcggcatcggcggcgactacccgctgtcggccaccatcatgtccgagtacgccaacaagaggacccgcggcgccttcatcgcggccgtcttcgccatgcagggcttcggcatcctcgccggcggcatcgtcacgctcgtcatctccgccgccttccgcgcggcgtacccgtccccggcgtacagggacgaccacttcacctccaccgtgccgcaggccgacttcgtgtggcgggtcatcctcatgctcggcgccgcgccggcgctgctcacctactactggcggatgaagatgcccgagacggcgcggtacacggcgctggtggccaagaacgccaagcaggccgcggccgacatgtccaaggtgctgcagactgagatcgtggacgagcaggagaagctggacgccgccgagggcgccaacagcttcggcctcttctccagggagttcgcgcgccgccacggcctccacctcgtgggcaccgccaccacctggttcctgctcgacatcgccttctacagccagaacctgttccagaaggacatcttcaccagcatcaactggatccccaaggccaacaccatgagcgcgctggaggaggtgtaccgcatctcccgcgcgcagaccctcatcgcgctctgcggcacagtcccgggctactggttcaccgtcgcgctcatcgacgtcgtcggccgcttcgccatacagctgctgggcttcttcatgatgaccgtcttcatgctcggcctcgccatcccctaccaccactggaccacgccgggcaaccacatcggcttcgtcgtcatgtacgccttcaccttcttcttcgccaacttcgggcccaacagcaccaccttcatcgtgcccgccgagatcttcccggcgcgcctgcgctccacctgccacggcatctccgccgcctcggggaaggccggggccatcatcggcgcgttcggcttcctgtacgcggcgcagaaccaggacaggagcaagacggacgccggctaccccgcgggcatcggcgtgcgcaactcgctcttcgtcctcgccgccagcaacatgctcggcttcgtcctcacgttcctcgtgccggagtccaggggcaagtcgctcgaggagatgtccggtgaggctgaagactcagaggaggagcccgtcggcgcccgtgcggtgcggccgtcggagacccagatggtgtagagaatcgatcgatcgacgcgtgttccttcctgcactgcacatggtgggctatcatgtcctcaattgtttttttccacgttaaagtcaaccctggctgtg

SEQ ID NO: 4484 - DNA, 1789 bp, Zea mays
gaacacccttctctggtcgtcgcatcgcagggcagctagctaggtagctaacatccgccatggcgcgcgggggagacggcctgcaggtgctgagcgcgctggacgcggcgaagacgcagtggtaccacttcacggccatcatcgtcgccggcatgggcttcttcacggacgcctacgacctcttctgcatctccctcgtcaccaagctgctgggccgcatctactacacggacaccagcaaggacagccccgggtcgctgccgcccaacgtcgcggcggcggtcaacggcgtggccttctgcggcacgctggcggggcagctcttcttcggctggctgggcgacaagctggggcgcaagagcgtgtacgggatgacgctcatggtcatggtcatctgctccgtcgcgtcgggcctctcgttcggccacacccccacgggggtcatggccacgctctgcttcttccgcttctggctcggcttcggcatcggcggcgactacccgctgtcggccaccatcatgtccgagtacgccaacaagaggacccgcggcgccttcatcgccgccgtcttcgccatgcagggcttcggcatcctcgccggcggcatcgtcacgctcgtcatctccgccgccttccgcgcggcgtacccgtccccggcgtacagggacgaccacttcacctccaccgtgccgcaggccgacatcgtgtggcgggtcatcgtcatgctcggcgccgcgccggcgctgctcacctactactggcggatgaagatgcccgagacggcgcggtacacggcgctggtggccaagaacgccaagcaggccgccgccgacatgtccaaggtgctgcacacggagatcgtggacgagcaggagaagctggacgccgccgagggcgccaacagcttcggcctcttctccagggagttcgcgcgccgccacggcctccacctcgtcggcaccgccaccacctggttcctgctcgacatcgccttctacagccagaacctgttccagaaggacatcttcaccagcatcaactggatccccaaggccaacaccatgagcgcgctggaggaggtgtaccgcatctcccgcgcgcagaccctcatcgcgctctgcggcacagtcccgggctactggttcaccgtcgcgctcatcgacgtcgtcggccgcttcgccatacagctgctgggcttcttcatgatgaccgtcttcatgctcggcctcgccatcccctaccaccactggaccacgccgggcaaccacatcggcttcgtcgtcatgtacgccttcaccttcttcttcgccaacttcgggcccaacagcaccaccttcatcgtgcccgccgagatcttcccggcgcgcctgcgctccacctgccacggcatctccgccgcctcggggaaggccggggccatcatcggcgcgttcagcttcctgtacgcggcgcagaaccaggacaggagcaagacggacgccggctaccccgcgggcatcggcgtgcgcaactcgctcttcgtcctcgccgccagcaacatgctcggcttcgtcctcacgttcctcgtgccggagtccaagggcaagtcgctcgaggagatgtccggtgaggctgaagactcagaggaggagcccgtcggcgcccgtgcggtgcggccgtcggagacccagatggtgtagagaatcgatcgatcgacgcgtgttccttcctgcactgcacatggtgggctatcatgtcctcaattgtttttttccacgttaaagtcaaccctggctgtgttttgatgtgc

SEQ ID NO: 4485 - DNA, 1884 bp, Zea mays
gcatcaagctaggcaggcctggtcccgaagaacacccttctctggtcgtcgcatcgcagggcagctagctaggtagctaacatccgccatggcgcgcgggggagacggcctgcaggtgctgagcgcgctggacgcggcgaagacgcagtggtaccacttcacggccatcatcgtcgccggcatgggcttcttcacggacgcctacgacctcttctgcatctccctcgtcaccaagctgctgggccgcatctactacacggacaccagcaaggacagccccgggtcgctgccgcccaacgtcgcggcggcggtcaacggcgtggccttctgcggcacgctggcggggcagctcttcttcggctggctgggcgacaagctggggcgcaagagcgtgtacgggatgacgctcatggtcatggtcatctgctccgtcgcgtcgggcctctcgttcggccacacccccacgggggtcatggccacgctctgcttcttccgcttctggctcggcttcggcatcggcggcgactacccgctgtcggccaccatcatgtccgagtacgccaacaagaggacccgcggcgccttcatcgccgccgtcttcgccatgcagggcttcggcatcctcgccggcggcatcgtcacgctcgtcatctccgccgccttccgcgcggcgtacccgtccccggcgtacagggacgaccacttcacctccaccgtgccgcaggccgacatcgtgtggcgggtcatcgtcatgctcggcgccgcgccggcgctgctcacctactactggctgatgaagatgcccgagacggcgcggtacacggcgctggtggccaagaacgccaagcaggccgccgccgacatgtccaaggtgctgcacacggagatcgtggacgagcaggagaagctggacgccgccgagggcgccaacagcttcggcctcttctccagggagttcgcgcgccgccacggcctccacctcgtcggcaccgccaccacctggttcctgctcgacatcgccttctacagccagaacctgttccagaaggacatcttcaccagcatcaactggatccccaaggccaacaccatgagcgcgctggaggaggtgtaccgcatctcccgcgcgcagaccctcatcgcgctctgcggcacagtcccgggctactggttcaccgtcgcgctcatcgacgtcgtcggccgcttcgccatacagctgctgggcttcttcatgatgaccgtcttcatgctcggcctcgccatcccctaccaccactggaccacgccgggcaaccacatcggcttcgtcgtcatgtacgccttcaccttcttcttcgccaacttcgggcccaacagcaccaccttcatcgtgcccgccgagatcttcccggcgcgcctgcgctccacctgccacggcatctccgccgcctcggggaaggccggggccatcatcggcgcgttcggcttcctgtacgcggcgcagaaccaggacaggagcaagacggacgccggctaccccgcgggcatcggcgtgcgcaactcgctcttcgtcctcgccgccagcaacatgctcggcttcgtcctcacgttcctcgtgccggagtccaagggcaagtcgctcgaggagatgtccggtgaggctgaagactcagaggaggagcccgtcggcgcccgtgcggtgcggccgtcggagacccagatggtgtagagaatcgatcgatcgacgcgtgttccttcctgcactgcacatggtgggctatcatgtcctcaattgtttttttccacgttaaagtcaaccctggctgtgttttgatgtgcaaaaaaaaaaaaaaaaaaaaaaaaaaaaaaaaaaaaaaaaaaaaaaaaaaaaaaaaaaaaaaaaaa

SEQ ID NO: 4486 - DNA, 2025 bp, Sorghum bicolor
ccatttgtgcacacccacaagcttcaagctccctccaggcatctcccaaatccccccagccgaacaaacaaacttggacaggggcagctagcatccatccatccgccatggcgcgcgggggagacggcctgcaggtgctcagcgcgctggacgcggccaagacgcagtggtaccacttcacggccatcatcgtggccggcatgggcttcttcaccgacgcctacgacctcttctgcatctccctcgtcaccaagctgctgggccgcatctactacacggacaccagcaaggacaaccccggctcgctccctcccaacgtcgccgccgcggtcaacggcgtcgccttctgcggcacgctcgccggccagctcttcttcggctggctcggcgacaagctcggccgcaagagcgtctacgggatgacgctcatgctcatggtcatctgctccatcgcgtcgggcctctccttcggccacacccccacgggtgtcatggccacgctctgcttcttccgcttctggctcgggttcggcatcggcggcgactacccgctgtccgccaccatcatgtccgagtacgccaacaagaagacccgcggcgccttcatcgccgccgtcttcgccatgcagggcttcggcatcctcgccggtggcattgtcacgctcatcatctccgccgcgttccgcgccgggtaccctgccccggcgtacaaggacgaccacttcaactccaccgtgccgcagtccgacttcgtgtggcgcatcatcctcatgctcggcgccttgccggcgctgctcacctactactggcggatgaagatgcccgagacggcgcgctacaccgcgctggtggccaagaacgccaagcaggccgcggccgacatgtccaaggtgctccacacggagatcgtcgacgagcaggagaagctggaccagatggtcaccgccgagagcaacaccttcggcctcttctccagggagttcgcgcgccgccacggcctccacctcgtcggcaccgccaccacctggttcctgctcgacatcgccttctacagccagaacctgttccagaaggacatcttcacggccatcaactggatccccaaggccaacaccatgagcgcgctcgaggaggtgttccgcatctcccgcgcgcagacgctcatcgcgctctgcggcaccgtcccggggtactggttcaccgtcgcgctcatcgacgtcgtcggacgattcgccatccagctgctcggattcttcatgatgaccgtcttcatgctcggcctcgccatcccctaccaccactggaccaccgccggcaaccacatcggattcgtcgtcatgtacggcttcaccttcttcttcgcaaacttcgggcccaacagcaccaccttcatcgtgccggctgagatcttcccggcgcggctgcgctccacctgccacggcatctccgccgcctcggggaaggccggagccatcatcggcgccttcgggttcctgtacgcggcgcagaaccaggacaagagcaaggcggacgccgggtaccccgcgggcatcggcgtgcgcaactcgctcttcgtcctcgcgggctgcaacatgctcggattcgtcctcactttcctcgtgccggagtccaagggcaagtcgctggaggagatgtcaggtgaggctgacgacgccgaggaggaggccgtcggcgcccgcgcggtgcggccgtcggagacccagatggtatagaatcgaacgcgttcacacgggagctggttcttcttcttcttcttcttcttcctgcacctgcacatggggagacttgtgtaggcgcttcagttcaattgtgtttttgtttctccatgtatgcaagtcaagtcgcacctctgtttcgctgtccaggagtagttcgtatgtggtgcaggtgcatgtgtgttatgtacttattataggcgggaaagtaagtgaacttacactcgtatacccaaccttttactggtgtgaaaagttatgctgaaaatattattcgctgatttattat

SEQ ID NO: 4487 - DNA, 1939 bp, Zea mays
caacaagctaggcagctgcaagcatctcccaaatcccagcctgctgccccgcgcgaacacacttctcttgtcgttgcattgcagggcagctagccggctacagcatccgccatggcgcgcggcggggacggcctgcaggtgctcagcgcgctggacgcggcgaagacgcagtggtaccacttcacggccatcatcgtcgccggcatgggcttcttcacggacgcctacgacctcttctgcatctccctcgtcaccaagctgctggggcgcatctactacacggacaccagcaaggacaacccgggctcgctcccgcccaacgtcgccgcggcggtcaacggcgtcgccttctgcggcacgctggccggccagctcttcttcggctggctcggggacaagctcgggcgcaagagcgtgtacgggatgacgctcatgctcatggtcatctgctccgtcgcgtcgggcctctcgttcggccacacgcccacgggggtcatggccacgctctgcttcttccgcttctggctcgggttcggcatcggcggggactacccgctgtcggcgaccatcatgtccgagtacgccaacaagaagacccgcggcgccttcatcgcggccgtcttcgccatgcagggcttcggcatcctcgccggcggcattgtcacgctcgtcatctccgccgccttccgcgcggggtacccggccccggcgtacagggacgaccacttcaactccaccgtgccgcaggccgactacgtgtggcgcatcatcctcatcctgggcgccgcgccggcgatgctcacctactactggcggatgaagatgcccgagacggcgcgctacaccgcgctcgtggccaagaacgccaagcaggccgcggccgacatgtccagggtgctccagacggagatcgtcgacgagcaggagaagctggacgagatggtcaccgccgagagcaacaccttcggcctcttctccagggagttcgcgcgccgccacgggctccacctcgtcggcacctccaccacgtggttcctgctcgacatcgccttctacagccagaacctgttccagaaggacatcttcaccagcatcaactggatccccaaggccaacaccatgagcgcgctggaggaggtgttccgcatctcccgcgcccagacgctcatcgcgctctgcggcaccgtcccgggctactggttcaccgtcgcgctcatcgacgtcgtcggccgcttcgccatccagctgctcggcttcttcatgatgaccgtcttcatgctcggcctcgccatcccctaccaccactggaccacgcccggcaaccacatcggcttcgtcgtcatgtacgccttcaccttcttcttcgcaaacttcggccccaacagcaccaccttcatcgtgccggccgagatcttcccggcgcggctgcggtccacatgccacggcatctccgccgcctcggggaaggccggcgccatcatcggggcctttgggttcctgtacgcggcgcagaaccaggacaagagcaaggcggacgccgggtaccccgcgggcatcggcgtacgcaattcgctcttcgtcctcgctgcctccaacttgcttggctttatcctcaccttcctcgtgccggagtccaagggtaagtcgctcgaggagatgtccggggaggctgacgacgccgaggacgacgccgtcggcacccgcgcggtgcggccgtcggggacccagatggtgtagaatcgaacatggcgacgcgtgcacacgggtcctccatcctggggcccgactgggaagacaaggcgcgccggttcaagcctgccgatgctttgctgtgcagaagtagttcgtacaggtgcatgtgtgttataggcgggaaagtaagtgaacttacacgcttgtatttattatatccaaccttacgtacaaaaaaaaaaaaaaa

SEQ ID NO: 4488 - DNA, 1830 bp, Zea mays
aagtatcaagctaggcaggcctggtcccgaagaacacccttctctggtcgtcgcatcgcagggcagctagctaggtagctaacatccgccatggcgcgcgggggagacggcctgcaggtgctgagcgcgctggacgcggcgaagaccagtggtaccacttcacggccatcatcgtcgccggcatgggcttcttcacggacgcctacgacctcttctgcatctccctcgtcaccaagctgctgggccgcatctactacacggacaccagcaaggacagccccgggtcgctgccgcccaacgtcgcggcggcggtcaacggcgtggccttctgcggcacgctggccggccagctcttcttcggctggctgggcgacaagctggggcgcaagagcgtgtacgggatgacgctcatggtcatggtcatctgctccgtcgcgtcgggcctctcgttcggccacacccccacgggggtcatggccacgctctgcttcttccgcttctggctcggcttcggcatcggcggcgactacccgctgtcggccaccatcatgtccgagtacgccaacaagaggacccgcggcgccttcatcgccgccgtcttcgccatgcagggcttcggcatcctcgccggcggcatcgtcacgctcgtcatctccgccgccttccgcgcggcgtacccgtccccggcgtacagggacgaccacttcacctccaccgtgccgcaggccgacttcgtgtggcgggtcatcctcatgctcggcgccgcgccggcgctgctcacctactactggcggatgaagatgcccgagacggcgcggtacacggcgctggtggccaagaacgccaagcaggccgcggccgacatgtccaaggtgctgcagactgagatcgtggacgagcaggagaagctggacgccgccgagggcgccaacagcttcggcctcttctccagggagttcgcgcgccgccacggcctccacctcgtcggcaccgccaccacctggttcctgctcgacatcgccttctacagccagaacctgttccagaaggacatcttcaccagcatcaactggatccccaaggccaacaccatgagcgcgctggaggaggtgtaccgcatctcccgcgcgcagacgctcatcgcgctctgcggcacagtcccgggctactggttcaccgtcgcgctcatcgacgtcgtcggccgcttcgccatccagctgctgggcttcttcatgatgaccgtcttcatgctcggcctcgccatcccttaccaccactggaccacgccgggcaaccacatcggcttcgtcgtcatgtacgccttcaccttcttcttcgccaacttcgggcccaacagcaccaccttcatcgtgcccgccgagatcttcccggcgcgcctgcgctccacctgccacggcatctccgccgcctcggggaaggccggggccatcatcggcgcgttcggcttcctgtacgcggcgcagaaccaggacaggagcaagacggacgccggctaccccgcgggcatcggcgtgcgcaactcgctcttcgtcctcgccgccagcaacatgctcggcttcgtcctcacgttcctcgtgccggagtccaagggcaagtcgctcgaggagatgtccggtgaggctgaagactcagaggaggagcccgtcggcgcccgtgcggtgcggccgtcggagacccagatggtgtagagaatcgatcgatcgacgcgtgttccttcctgcactgcacatggtgggctatcatgtcctcaattgtttttttccacgttaaagtcaaccctggctgtgttttgcaaaaaaaaaaaaaaaa

SEQ ID NO: 4489 - DNA, 1611 bp, Hordeum vulgare subsp. vulgare
gcgcggtcggagcagcaggggctgcaggtgctgagcgcgctggacgcggccaagacgcagtggtaccacttcacggccatcgtcgtcgccggcatgggcttcttcaccgacgcctacgacctcttctgcatctccctcgtcaccaagctcctcggccgcatctactacaccgacctctccaagcccgaccccggctccctgccccccagcgtcgccgccgccgtcaacggcgtcgccttctgcggcaccctcgccggccagctcttcttcggctggctcggcgacaagatgggccgcaagagcgtctacggcatgaccctcctcctcatggtcatctgctccatcggctcgggcctctccttcgcgcacacacccaagagcgtcatggccacgctctgcttcttccgcttctggctcggcttcggcatcggcggcgactacccgctctcggccaccatcatgtccgagtacgccaacaagaagacccgcggcgcattcatcgccgccgtcttcgccatgcagggcttcggcatcctcgccggcggcatcgtcaccctcatcatctcatccgccttccgcgccgggttccacgagccggcctaccaggacgaccgcgtcgcgtccaccggcacggaggccgacttcgtgtggcgcatcatcctcatgctcggcgccctgccggccctgctcacctactactggcggatgaagatgcccgagacggcgcgctacaccgccctcgtcgccaagaacgccaagctggccgccgccgacatgtccaaggtgctgcaggtggagctggaggacgagacggagaagatggacgagatggtgagccgcggggcgaacgacttcggcctcttctcgccgcagttcgcgcggcgccacggcctccacctcgtcggcacggcgaccacgtggttcctgctggacatcgccttctacagccagaacctgttccagaaggacatcttcacgagcatcaactggatccccaaggcgcgcaccatgagcgcgcttgacgaggtgttccgcatctcccgcgcgcagacgctcatcgcgctctgcggcacagtgccgggctactggttcacggtcttcctcatcgacgtcgtcggccgcttcgccatccagctcatgggattcttcatgatgaccgtcttcatgctcggcctcgccgtgccgtaccaccactggacaacgccgggcaaccagatcggcttcgtggtcatgtacggcttcaccttcttcttcgccaacttcgggcccaacgcaaccaccttcgtcgtgccggcggagatcttcccggcgaggctgcgatcgacgtgccacgggatatcggcggccgcggggaaggccggagccatgatcggggcgttcgggttcctgtacgcggcgcaggacccgcacaagccggacgccgggtacaggcccgggatcggggtgcgcaactccctcttcgtgctcgccggggtcaacctgctggggttcatgttcaccttcctggtgccggaggccaacgggaagtcgctggaggagatgtccggcgaggcacaggacaacgagaacgaggaccaggcacgaaccgccgccgtgcagccgtccatggcc

SEQ ID NO: 4490 - DNA, 2318 bp, Oryza sativa Japonica Group
gtgcccagagagctcgacacaaatacagggggactcgtcttcttccccgagctttgcgagcagagtcgttcagccatggcgcggcaggagcagcagcagcacctgcaggtgctgagcgcgctggacgcggcgaagacgcagtggtaccacttcacggcgatcgtcgtcgccggcatgggcttcttcaccgacgcctacgacctcttctgcatctccctcgtcaccaagctgctcggccgcatctactacaccgacctcgccaaggagaaccccggcagcctgccgcccaacgtcgccgcggcggtgaacggagtcgcgttctgcggcacgctggcggggcagctcttcttcgggtggctcggcgacaagctcggccggaagagcgtgtacgggatgacgctgctgatgatggtcatctgctccatcgcgtcggggctctcgttctcgcacacgcccaccagcgtcatggcgacgctctgcttcttccggttctggctcggattcggcatcggcggcgactacccgctgtcggcgacgatcatgtcggagtacgccaacaagaagacccgcggcgcgttcatcgccgccgtgttcgcgatgcaggggttcggcatcctcgccggcggcatcgtcaccctcatcatctcctccgcgttccgcgccgggttcccggcgccggcgtaccaggacgaccgcgcgggctccaccgtccgccaggccgactacgtgtggcggatcatcctcatgctcggcgccatgccggcgctgctcacctactactggcggatgaagatgccggagacggcgcgctacaccgccctcgtcgccaagaacgccaagcaggccgccgccgacatgtccaaggtgctccaggtcgagatccaggaggagcaggacaagctggagcagatggtgacccggaacagcagcagcttcggcctcttctcccgccagttcgcgcgccgccacggcctccacctcgtcggcaccgccacgacatggttcctcctcgacatcgccttctacagccagaacctgttccagaaggacatcttcaccagcatcaactggatccccaaggccaagaccatgtcggcgctggaggaggtgttccgcatcgcgcgcgcccagacgctcatcgccctgtgcggcaccgtcccgggctactggttcaccgtcttcctcatcgacatcgtcggccgcttcgccatccagctgctagggtttttcatgatgaccgtgttcatgctcggcctcgccgtgccgtaccaccactggacgacgaaggggaaccacatcggcttcgtcgtcatgtacgccttcaccttcttcttcgccaacttcggccccaactccaccaccttcatcgtgccggcggagatcttcccggcgaggctgcgttccacctgccacggcatctcggcggcggcggggaaggccggcgccatcatcggatcgttcgggttcctgtacgcggcgcaggacccgcacaagcccgacgccgggtacaaacccgggatcggggtgaggaactcgctgttcgtgctcgccggatgcaacctgctcgggttcatctgcacgttcctcgtgccggagtcgaaggggaagtcgctggaggagatgtccggcgaggcggaggacgacgacgacgaggtggccgccgccggcggtggcgccgccgtgcggccgcagacggcgtagtgtatgactgcacgtgaatatagtgttgatgtgatggaaaaggactgaagtttggatctaaacacagcctatgaagtctaaagttattggttcaaattttgctgaaagttctgtttttcttcacaaaaagtagctttaaagttggaaatggactaactgtggagaatatatgtgaaccagatatgaaaaattgacttgcactatgatctgagtacgaagtcgaaattgagtatatttgactatgaactccatacttaggccacgtttgggggcccacagtacctaggtgacaaaaacgaaatacaacaaatttcgacgaaatttctgaccaaaggaggcctgcattgatgccgatggctcaataaagcagcagttgaattgttggacagcgtatttttctgacaaatatccggcaagtctgaagttcaggataaatagccaggcagggaagaagcgtgttcactgaattttgcaaaatttcttcagtcattcttgttgacgcggcaaaccccaatttaagccaaagtttggtaacctttttttgagtgtttggctgttaatttggggaagtgtaagtttgtttgaacagtaagtgagtatgaaaacatttattttag

SEQ ID NO: 4491 - DNA, 1984 bp, Zea mays
gaacatatccacacctagggtttcctctccagtctccacggatcaaaatcgaatccaacgctactgcctagggtttcctctgcatttcccctaccacaccccgcgccgcccacccatggccgccgcagacgcgtccgccgagaccgccgccatcgcgcggcgcctggcctcctgcaacaccggcacccgggagcgcgcgctccgctacctcctctccgaatttctgccggcctccgcgccgcgcctctccgccaccgacctcctcaagctctggaagggcatcttcttctgcttctggcacgccgacaagccgctctaccagagctccgtcgccacgcgcctcgcctccgccgtctccgtcccgccgtcccccgccgatggtgccgccttcctcgccgcctacctcaccacgctccgccgcgagtgggcccacatcgacgtccaccgcctcgacaagttctacctcctcaaccgccggttcctccaccacgccttcctgcttctccatgctaactccttcgcccccgacgtcacctcccaggtcgtgtccgtcctgtcagacaaggccctgctcccggaagccgacaacgtcgccgctgccacctcccggggcctcgggtaccacgtcgccgaggcgttccttgacgagctcctgcctgtgctccccgtgagcctggagacgatggacaccctgcttgctccgttcttcactgtgttggagaagtcgaccgatcgggtgatggtgagtaaggtgaaggcaggtgtgtttgagaggttactagacagcggcagtcggttgctggagatggtgaaaaagggggaggatgtggagaagggtgaccccgaggagaagctcggtaaagttggattgctgtttggattcagcaagaggttcctggatattggtgcaatggcagagacagtgcaatcgaaccggaaggtggtctttgggttgagggatgcgtttgtgaagatcgagaagggtttgcagttatctggtcttgagatccctgcaccaaagtttgaggctactgaggtgccagtgccgccaaatgtgggcaagggaaaggcacaaaagaagaagaaaaagaccaagaaggctgcattggctgaaggtgagatggaggatgacaaggatttgaaacgtgagaagaagataaagaaggaaaagaaggataagaaaaggaggaaggtggaggttgttgatgaaggggatgtcaatgagaagagtactgatgctccaggagctgaccaacagatgggtgatggtactgatggcattacattcgatgcagctttaaagtccaaccttcagaagcagtttgagatggtggcagcagaagctggtatggcagaagggggcagcagctcaagtgattcaccagtgacaccagttactgggaaagtggcaacaaagaggaagcgttcaaaatctgctgataagctgtctgaagcttctgatggggatggtggcagcgaaggtaatcttcttgcccaagatggagagaagagtggtaagaaggtgaggttctcgatgaagaataatttagtttggagacctcacaatcctttgccaccgcagtgtttgaggctgccaccttcagctactccaagaggaagcgcactaaaaaagggtgtccagccaggtcccataacaccgaccccattgaagaaggctaagccaaaggcaaaatccgcaaagaaggtcttgaagaagccgccttcatctgctgtgaagcgcttgcggaagtccagagtttctcagcctgagtttttttggtgtatgacgccatgatggtcatgtcaatgtatcttttctgttttagtttatcattacttaattcttatcctttttgtaggttagtttatactgtgttgacttagctgtcagttcatatttgatggattgcttaatgatttgtgtggtcactatgcttttataataatcatgtggtgattgcaacagtgaaaaaaaaaaaaaaaa

SEQ ID NO: 4492 - DNA, 1848 bp, Zea mays
gcctagggtttggtccgcctttcacttacccaccccgcgacgcccacccatggccgccgccgccgccgccgccgccgccgccgatgtgcccgccgaggccgccgccatcgcgcggcgcctggcctcctgcaacaccggcacccgggagcgcgctgtccgctacctcctctccgacttcctgccggcctccgcgcggcgcctttccgccaccgacctcatcaagctctggaagggcctcttcttctgcttctggcatgccgacaagccgctctaccagagctccgtcgccacgcgccttgcctccgccgtctccgccccgccgtcccccaccgacggcgccgccttccttgccgcctacctcaccacgctccgccgcgagtgggcacacatcgacgtccaccgcctcgacaagttctacctcctcaaccgccggttcctccaccacgccttcctgctcctcagcgccaactccttcgcccccgtcgtcacctcccaggtcgtgtccgtcctgtcggataaggccctgctcccggaagccgacagcgccgccgccggcacctcccggggcctcgggtaccacgtcgccgaggcattcctagacgagctcttgcctgtgctccccgttaccctggagacggtggacgccctgctggctccgttcttcatcgtgttggcgaagtcgaccgatcgggtgatggtgagtaaggtgaagacatgcgtgtttgagaggttactggagagtggcagtcgtttgcttgagatggtgaagaaaggggaggaggtggacaagggtagcgctgaggagaagctcgggaaatttgggttactgtttggatttagcaagaggttcctggatattggtgcgaatgcagcgacggtgcaatggaaccggaaggtgctctttgggttgagggatgcatttgtgaagattgagaaggctttgcagctatctggtctcgagatccctgtgccacagtttgaggctgctgagctgtccgtgcaaccaaatgcgggcgatgaaaaggcacaaaagaagaaaaagacgaagaatgttgcattggctgaaggtgagatgggggatgccaaggatttgaagcgtgagaagaaggtaaagaaagacaagaaggtgaagaaagagaagaagaaaaagaggaaggtggaggttgttgatgaagggaacaccaccgataagagtactgatgctcctgtagatgatcagcagatcggtgatggtgctgatggcattacatttgatgagacattaaagtccaatcttcagaagcagtttgagatggctgcagcagaagctggtatggtcaaagggggcagcagctcaagcgcttcaccagtgacaccagtcagtgggaaagtggcaacaaagaggaagcgctcaaagtctgccgataagctgtctgaagcttctgatgggggtgatggcagcgaaggtaatcttcttgcccaggatggagagaagagtggtaagaaggtgaggttctcgatgaagaataatttagtttggaaacctcacaatcctttgccaccgcagtgtttgaggctgccaccttcggctactccaaggggaagtgctctaaaaaagggcgtaaagccaggtcccataacaccgacaccattgaggaaggcgaagcctaaggcaaaatctgcaaagaaggtcttgaagaagcaaccttcatctgctgtgaagcgcttgcggaagttgcagagtttttcagcatgagcttttgtatcttttttgttctgggcttatcattacttagttcttatcctttttgtaggttagttttatactaagttgacttctctgccagttcataatttgatggattgctt

SEQ ID NO: 4493 - DNA, 1625 bp, Oryza sativa Japonica Group
cggcgcctggcctcctgcaacggctccgcacgggagcgcgcggtgcggcacctcctctccaccttcctcccggcctcggctccgcacctctccgcctccgacctcctcaagctctggaagggcctcttcttctgcttctggcactccgacaagccgctctaccagtcctccctcgccacccgcctcgccgccggcgtctcctcgggcccctcgccggccgccgccgccgccttcttcgccgcctacctcgccaccctccgccgcgagtgggtccacatcgacacccaccgcctcgacaagttctacctcctcaaccgcaggttcctccaccacgccttcctcctcctcgccgccaactccttcgccgccgacctcacctcccaggtcgtatcgatcctgtcggagaaggtactccttcccgaggccgacaacgtcgccgccggctcgccccgtgggcttgggtaccatgtcgccgaggtgtttctggacgagctgtcgcctgtgctccctgtgagcttacagacaatggaggtgttgctatctcctttcttcgctgtgttggagaagtcatctgatagggtgatggtggctaaggttaagtctagtgtgtttgagaggttcctcgagagcggcaaacaattgctcgagatggcgaagaaaggcgagggggtggagaaggggagcgcagacgagaagattgggaaggttggcttgctgtttgggttcagcaagaggttctcagatattggggcgaaggcggagaccgtgcaagcaaaccgaaaggtgctatttgggctgagggatgcgtttgtgaaggttgagaaaggattggagctctctggggtcgagattgctgtgccagagttcaagagtaccgaggtgacaggggtggagaatggcatggatttggatgaggtgaaggtggagaagaagaagaagaaaaaggcgaagaaagcttcattggtggaaggtgagacagagggggccaaggattcaaagcaagagaaaaaggtcaagaaggagaagaaagagaagaagaaaaagaagaaggtagaggttgttgatgagggagatgtcacggaacagagtacagacgctcctgcagaggaggaccaacagatgggtgatggtactgaggctgttacatttgatgagacattgatgtccaatctccagaagcagtttgagaaggctgcagcagaagctggtatggtcaatggaggcagcagctcaagtgctttgcccgctagtgggaaagctgcaaagaaaaggaagagagcaaaatctgcagataggttatcggtttctgatggagacgatgttagcagcgaaggtacaattatttcccaggatggggagaagagcggtaagaaagtgaggttctcgatgaagaataatctagtttggaagcctcacaatcctttgccgccgcagtgcttgaggctgccaccatctgctactccaagagggagtgcactaaaaaagggtgttctgcctgggcctataaaagaaacgcctacgcctgtgaagaagactaagccaaaagcgaaatctgcaaagaaggtcttgaagaagccttcctcagccgcgaagcgcttgcggaagttgcaaaatttctctgcatg

SEQ ID NO: 4494 - DNA, 1810 bp, Oryza sativa Japonica Group
acgcatcggccgaggccgcggccatcgcgcggcgcctggcctcctgcaacggctccgcacgggagcgcgcggtgcggcacctcctctccaccttcctcccggcctcggctccgcacctctccgcctccgacctcctcaagctctggaagggcctcttcttctgcttctggcactccgacaagccgctctaccagtcctccctcgccacccgcctcgccgccggcgtctcctcgggcccctcgccggccgccgccgccgccttcttcgccgcctacctcgccaccctccgccgcgagtgggtccacatcgacacccaccgcctcgacaagttctacctcctcaaccgcaggttcctccaccacgccttcctcctcctcgccgccaactccttcgccgccgacctcacctcccaggtcgtatcgatcctgtcggagaaggtactccttcccgaggccgacaacgtcgccgccggctcgccccgtgggcttgggtaccatgtcgccgaggtgtttctggacgagctgtcgcctgtgctccctgtgagcttacagacaatggaggtgttgctatctcctttcttcgctgtgttggagaagtcatctgatagggtgatggtggctaaggttaagtctagtgtgtttgagaggttcctcgagagcggcaaacaattgctcgagatggcgaagaaaggcgagggggtggagaaggggagcgcagacgagaagattgggaaggttggcttgctgtttgggttcagcaagaggttctcagatattggggcgaaggcggagaccgtgcaagcaaaccgaaaggtgctatttgggctgagggatgcgtttgtgaaggttgagaaaggattggagctctctggggtcgagattgctgtgccagagttcaagagtaccgaggtgacaggggtggagaatggcatggatttggatgaggtgaaggtggagaagaagaagaagaaaaaggcgaagaaagcttcattggtggaaggtgagacagagggggccaaggattcaaagcaagagaaaaaggtcaagaaggagaagaaagagaagaagaaaaagaagaaggtagaggttgttgatgagggagatgtcacggaacagagtacagacgctcctgcagaggaggaccaacagatgggtgatggtactgaggctgttacatttgatgagacattgatgtccaatctccagaagcagtttgagaaggctgcagcagaagctggtatggtcaatggaggcagcagctcaagtgctttgcccgctagtgggaaagctgcaaagaaaaggaagagagcaaaatctgcagataggttatcggtttctgatggagacgatgttagcagcgaaggtacaattatttcccaggatggggagaagagcggtaagaaagtgaggttctcgatgaagaataatctagtttggaagcctcacaatcctttgccgccgcagtgcttgaggctgccaccatctgctactccaagagggagtgcactaaaaaagggtgttctgcctgggcctataaaagaaacgcctacgcctgtgaagaagactaagccaaaagcgaaatctgcaaagaaggtcttgaagaagccttcctcagccgcgaagcgcttgcggaagttgcaaaatttctctgcatgaactcttttatgaattgacactgcagtgatcatgctttctgcatggtgtgtcttttcaaccgtgttctattattacttaattcttcacctaggttagtcttatacgctgttgactatgcaacaaatttatatttatggattgtttaatgttgtgtt

SEQ ID NO: 4495 - DNA, 1626 bp, Oryza sativa Indica Group
atctcgcggcgcctggcctcctgcaacggctccgcacgggagcgcgcggtgcggcacctcctctccaccttcctccctgcctcggctccgcacctctccgcctccgacctcctcaagctctggaagggcctcttcttctgcttctggcactccgacaagccgctctaccagtcctccctcgccacccgcctcgccgccggcgtctcctcgggcccctcgccggccgccgccgccgccttcttcgccgcctacctcgccaccctccgccgcgagtgggtccacatcgacacccaccgcctcgacaagttctacctcctcaaccgcaggttcctccaccacgccttcctcctcctcgccgccaactccttcgccgccgacctcacctcccaggtcgtatcgatcctgtcggagaaggtactccttcccgaggccgacaacgtcgccgccggctcgccccgtgggcttgggtaccatgtcgccgaggtgtttctggacgagctgtcgcctgtgctccctgtgagcttacagacaatggaggtgttgctatctcctttcttcgctgtgttggagaagtcatctgatagggtgatggtggctaaggttaagtctagtgtgtttgagaggttcctcgagagcggcaaacaattgctcgagatggcgaagaaaggcgagggggtggagaaggggagcgcagacgagaagattgggaaggttggcttgctgtttgggttcagcaagaggttctcagatattggggcgaaggcggagaccgtgcaagcaaaccgaaaggtgctatttgggctgagggatgcgtttgtgaaggttgagaaaggattggagctctctggggtcgagattgctgtgccagagttcaagagtaccgaggtgacaggggtggagaatggcatggatttggatgaggtgaaggtggagaagaagaagaaaaaggtgaagaaagcttcattggtggaaggtgagacggagggggccaaggattcaaagcaagagaaaaaggtcaagaaggagaagaaagagaagaagaaaaagaagaaggtagaggttgttgatgagggagatgtcacgaaacagagtacagatgctcctgcagaggaggaccaacagatgggtgatggtactgaggctgttacatttgatgagacattgatgtccaatctccagaagcagtttgagaaggctgcagcagaagctggtatggtcaatggaggcagcagctcaagtgcttcgcccgctagtgggaaagctgcaaagaaaaggaagagagcaaaatctgcagataggttatcggtttctgatggagacgatgttagcagcgaaggtacaattatttcccaggatggggagaagagcggtaagaaagtgaggttctcgatgaagaataatctagtttggaagcctcacaatcctttgccgccgcagtgcttgaggctgccaccatctgctactccaagagggagtgcactaaaaaagggtgttctgcctgggcctataaaagaaacgcctacgcctgtgaagaagactaagccaaaagcgaaatctgcaaagaaggtcttgaagaagcctttctcagccgcgaagcgcttgcggaagttgcaaaatttctctgca

SEQ ID NO: 4496 - DNA, 636 bp, Zea mays
ctcctcccgtctaattttatcaacgcttctcctgctggttactccgcgcgccttctctttctctcccggacgtcgatcgtgttcttcagcacgggctagctagctccctccctcccagccatggcgacgccggacaacaaggggcacgggcatccgctgcccaagtttggggagtgggacgtgaagaatccggccacgtccgagggcttcaccgtcatattccagaaggcccgcgacgacaagaagaccaccaccggccctggggctgggaacgcgcgcgcaggcattccgccggccttcaggaacggcggcggcgacggcgggtacaggcccgacttcggcgacggcaaccagtacgcgccgcccaaacggaagaagtgggccttctgtggctgctgaatcgaagctcgctgtgctgctgtgctgactcgaaaggagaacggatcgtgcagcagctcaagtgatccaggatgatgggagcgccgagacacgatggaaggcattaattatttcagccatggtgtttcgccttgctttaaccttttgctcatctctaccgaggaacactagttccatcgggtaactgaacctgcaaatcttcatgatgaaactgtcgcaccaaaaaaaaaaaaaaaa

SEQ ID NO: 4497 - DNA, 604 bp, Sorghum bicolor
gtccgccttctttcccggcctcccgtccccggcggccagccggccgtcctgttcgtcgtcagcggagggctaagctccctctcgggctcggccatggcgacgccggacaaggggcaggggcgtccgctgcccaagtttggggagtgggacgtgaagaatcccgccacgtccgagggcttcaccgtcatattccagaaagcccgcgacggcaagaagactaccggcggccccgggaacgtccgcgcaggcataccgccggccttcaggaacggcgatggcgccgacgacggcgggtacaggcctgacttcaaatacggcgacagcagccagcacacgccgcccaaacgcatcaagaagaagtgggccttctgtggctgctgattcttcatagctcgctgctgctgccgctgactccaaaggagaatgatcgtgccgcacctgaagcaatccaggatgggagcgccgggacagacgggaaaacatttcagccatgcatgctgtttcgccttgcttttacctttttgctcgtttctaccgaggaacagtagttccatcgggatcggaacgagctagcaacatggcttgtaactgaaacctgcaaatg

SEQ ID NO: 4498 - DNA, 593 bp, Oryza sativa Japonica Group
ccccccccccgcgtctattttttacctccacttctgctggttaaaggcctttttctccctcctccctcgcgtcgtccccggcggccgcccgggcgtcattctcgtctctcggccaccatgacgacgatggacaagggccgggcgctgcccaagtttggggagtgggacgtgaagaatccggcgtcggcggagggcttcacggtgatattccagaaggctcgcgacgacaagaagacgaccggccccgggaacgccagggtggggataccgccggccttccggagcaccgacgacgacggcggctacaggcccgaattcaagcccgccgagagctaccagcaacacacgccgcccaagcgcgtcaagaagaagtgggcattctgcgccgggtgttgattttctggcttctgctgctgttttttcggatgaggcggatcgcaattattcacaattgccgcaccagaagtattcctgatgggagcaagagcaaaataggagaggaggggggggggggtgtttctgtgatcatggtgttcgatctcttcacgtttatttgaccatgtttcatatgaatacattgcccatttgtatcg

SEQ ID NO: 4499 - DNA, 1876 bp, Zea mays
gcctagggtttcctctgcgtttcccctaccacaccccgcgccgcccacccatggccgccgcagacgcgtccgccgagaccgccgccatcgcgcggcgcctggcctcctgcaacaccggcacccgggagcgcgcgctccgctaccttctctccgactttctgccggcctccgcgccgcgcctctccgccaccgacctcctcaagctctggaagggcatcttcttctgcttctggcacgccgacaagccgctctaccagagctccgtcgccacgcgcctcgcctccgccgtctccgccccgccgtcccccaccgatggcaccgccttcctcgccgcctacctcaccacgctccgccgcgagtgggcccacatcgacgtccaccgcctcgacaagttctacctcctcaaccgccggttcctccaccacgccttcctgctcctccgtgctaactccttcgcccccgacgtcacctcccaggtcgtgtccgtcctgtcggacaaggccctgctaccggaagccgacaacgtcgccgctgccacctcccggggcctcgggtaccacgtcgccgaggcgttccttgacgagctcctgcctgtgctccccgtgagcctggagacgatggacaccctgcttgctccgttcttcactgtgttggagaagtcgaccgatcgggtgatggtgagtaaggtgaaggcaggtgtgtttgagaggttactagacagcggcagtcggttgctggagatggtgaaaaaaggggaggaggtggagaagggtgacgccgaggagaagctcggtaaagttggattgctgtttggattcagcaagaggttcctggatattggtgcaatggcagagacagtgcaatcgaaccggaaggtggtctttgggttgagggatgcgtttgtgaagatcgagaagggtttgcagttatctggtcttgagatccctgcaccaaagtttgaggctactgaggtgccagtgccgccaaatgtgggcaagggaaaggcacaaaagaagaaaaaggccaagaaggctgcattggctgaaggtgagatggaggaggacaatgatttgaaacgtgagaagaagataaagaaggaaaagaaggagaagaaaaggaggaaggtggaggttgttgatgaaggggatgtcactgagaagagtactaatgctccaggagctgaccaacagatgggtgatggtactgatggcattacattcgatgcagctttgaagtccaaccttcagaagcagtttgagatggtggcagcagaagctggtatggcagaagggggcagcagctcaagtgattcaccagtgacaccagttactgggaaagtggcaacaaagaggaagcgttcaaaatctgctgataagctgtctgaagcttctgctggggatggtggcagcgaaggtaatcttcttgcccaagatggagagaagagtggtaagaaggtgaggttctcgatgaagaataatttagtttggagacctcacaatcctttgccaccgcagtgtttgaggctgccaccttcagctactccaagaggaagcgcactaaaaaagggtgtccagccaggtcccataacaccgaccccattgaagaaggctaagccaaaggcaaaatccgcaaagaaggtcttgaagaagccgccttcatctgctgtgaagcgcttgcggaagttgcagagtttctcagcctgagttttgttggtgtatgacgccatgatggtcatgtcaatgtatcttttctgttttagtttatcattacttaattcttatcctttttgtaggttagtttatactgtgttgacttagctgtcagttcatatttgatggattgcttaatgatttgtgtggtcactatgctttataat

SEQ ID NO: 4500 - DNA, 1630 bp, Hordeum vulgare subsp. vulgare
cacgcggcgcttggcctcctgcaacaccggcgcccgcgagcgcgccgtccgctacctcctcgccgacttcctccccgcctccgcgccgcacctctccgacatcgacctcctcaagctctggaagggcctcttcttctgcttctggcacgccgacaagccgctctaccaggccgacctcgcctcccgcctcgccgccgccgtctccgccgccgccacgcccgccgccgccgccgacttcctcgccgcctacctcgccaccatccgccgcgagtggtcctccatcgacgtccaccgcctcgacaagttctacctcctcaaccgccggttcctccaccacgccttcctattcctcggcgcccgctccttcgcgcccgccgtcaccgcccagatcgtctccgtcatctcggagaaggccgtcctcccggaagccgacaacgccaccggccgtggactcggttaccatgtcgccgatgtgtttctcgacgagatcttgcccatgctcccggttagcttgcagtcgatggagctgctgttggcccccttcttcactgtgctggagaagtccaccgacagggtgctggtgagtaaggtcaggtccagcttgtttgagaggtttctggtgagcggcagtcagctgctcgagatgacgaggaaaggtgaagaggtggagaaggggagtgtggaagagaagcttgggcaggttggcctgttgtttggattcagcaagagattcctggatattggggcgaatgctgagaccgtgcaggggaatcggaaggtggtgtttgggctgagggatgcgttccttaagctcgaaaagggattggagctgtctggggttaagatttctgagccagagtttcagggcactcagccaccaatggtggcagtggtagaaaatggcatggatttggatgaggcaaaggtggaaaagaagaagaagaagaagaaggcaaagaaggctgcattagctgaaggtggggaggaggaggatgaggtcaaggctccgaagcaagagaagaaggtgaagaaagacaagaaaaaggagaaaaaggaaaagaagaagaagaagaataaggtggaggatagtgatggaggggatagcagtgagcagagtatagatgccacatcagaggaccagcagatgggcgatgacactgatgccattacatttgatgacgcttcgatgtccaatcttcaaaagcagtttgagaaggttgctgcagaagcagggatgccggtgacaccagttactgcaatagtggcaaagaagaggaagcgctcaaaatctgcagataggtcatcagaatcttctggtggagatgttggtagcaaaggcaatgttcctgctcaggatggagataagagtggtaagaaagtgaggttctcaatgaagagtaatctagtttggaaccctccgactcctttaccaccacagtgcttgaggctcccaccatctgctaccccaagagggagtgcactaaaaagtggagttcggcctgggcctataaaggaaagctctacgcaggtgaagaaggccaaggcaaaagcaaagtctgcaaagaaggtgttgaagaagagcccttcctcggctgtgaagcgcttgcggaagttgcaaaccttctctgcg

SEQ ID NO: 4501 - DNA, 3223 bp, Sorghum bicolor
gcctgctgcctccgtctttctgtttctctgtgcgtctcggagaagggagaacctccctcccactcgcctcgcagatccgcggcggcctgcttcgctgctgccttgcctgcaagcgtcagcggcaggggcggcccttctcccgtgacccacttcggtgccagcggctgctcccgtgggtgccgccgcctcgtctccctcctccttccagatccatccccgtgccccgcggcagggaccagatccaccaccgcgccacgagctccggcaggcggcatccgctcgccgcggacgtcccaggagtcccgtttgccagcgacgcctgcacgcgcgcgggcgcgctacgagctctccgccacctgccggacggcgtgaatcagcgacttgacagcaaaaggaccctttcaatcaaagagaagtttgtcactgaggctgaagaaaatctggatgtgtttaacttttagggcttactatttttgagaggtggtctgacatagactatccaaaattcagcgccagggctcagggggcgacctaccccaagttggggagttcgttccttttccagtgacaaggagggcaaactcatattccatcatgatggaagcggacatggaaaatggaaggtcgtatcaagaaagaccaaggaccttttcaacagtacgaagcaaatcatctgtaccagtggccttccgtttgttgatgaggataaatccccgtgccttgattattctctctcttttggtcttcagtggtgttctatatgtgggagccagtacatcaccaattgtggtctttgtgttctgtatatgtactctcagtctattcttctctctataccttacaaagtgggttcttgctaaggacgaaggacctccagaaatgtccgagatatctgatgccataagagatggcgctgaaggattttttaggacacaatatggaacaatttctaaaatggcatttattctggcctttgtcatccttggcatttatctctttcgcagtaccacgccgcagcaggaggcgtctggcttgggaagggcaacactagcctatattacagttgcttcttttctccttggagcattatgttctggactagctggctttgttggaatgtgggtgtctgtacgtgcaaatgtacgagtttcaagtgctgctcggcgctctgcgagggaagcattacagattgctgtccgtgctggtggtttctcagcaattgtggtcgtttgcatggctgtatttggcgtggcaatactgtactcaacattttatgtttggcttggagtagattcacctgggtcaatgaaggttaccgacttgcctcttctccttgtgggatatggttttggtgcctcttttgttgccctttttgctcagttgggtggtggaatatacaccaaagctgctgatgttggagctgatctggttggaaaagttgagcagggaataccagaagatgatcctcgtaacccagctgtcattgctgatttggttggtgacaatgttggagattgtgctgcccgaggcgctgatctttttgagagcatagcagcagaaattatcagtgcaatgatacttggaggaacgatggcacagcgctgtaaaattgaggatccctctggctttattttgtttcctcttgttgtccattcatttgatttggtggtgtcatcagttggaattctctcaatcagaggaacacgtgactctggactcatttcctctatcgaagatcccatggcaattatgcaaaaaggctactctgttactattgtgcttgctgttcttacgtttggagtgtctactcgttggctcctgtacacggaacaagcaccttctgcatggctaaattttgcactgtgtggcttggttgggatcatcacagcatatgcttttgtttggatttcgaagtattacacggattataaatatgagccagtccgccttttagctctttcaagttctacaggacatggaactaatattattgctggagtaagtttgggactggaatcaacagccctaccagttctagtgataagtgttgccattatatcagcctattggctggggcagacttctggcttggtggacgagtctggcaacccaactggtggtctttttgggacagctgtagcaacaatggggatgcttagcacagcagggtatgttctcactatggacatgtttggtcctatagctgacaacgccggtggtattgttgagatgagccagcagcctgaaagtgtgagggaaatcacagatgttctggatgctgtgggcaacacaactaaagctactacaaaaggatttgccatagggtcagcagcactggcttccttcctcctgttcagtgcatacatggatgaagtagcttcttttgctcaattgccattcaaggaggttgacatagcagtcccagagatcttcgttggtggtttattaggctcaatgcttatattcctgttcagtgcatgggcttgctcagcagttggcaaaactgcacaggaagttgttaatgaggtcaggagacaatttattgagaggcctggtattatggactacaaagagaagcctgattatggacgctgtgttgcaattgtggcatctgcatcgttgagagaaatgataaaacctggggctttagcaatcatatcacccatggctgttggggttgtcttccggattttgggccactacactgctcagcctcttcttggagctaaagttgtagcctccatgcttatgtttgcaacagttgctgggattctcatggcactcttcttgaacactgctggtggcgcctgggataatgcaaagaagtacattgagactggcgctcttggtggcaaaggcagcgagtcccataaggctgcagttactggtgacacggttggagacccattcaaagacaccgcgggtccatcgctgcacgttcttatcaagatgcttgccacaatcacattggtcatggctccgatattcttgtgattaaccaaccactcaatcaagctttgccattaaccctgcggagatgtatctatgcgacttatagatgaggtgttcacctgcttgtgatgtaatgatccactcggttttagtatcaatcactacatgttgtacccagagaaagaagcagcgatttatacccgtgtttcacggtagatataattatactgatgatggaaatgccatattttgtgacgaacattactgaact

SEQ ID NO: 4502 - DNA, 2974 bp, Zea mays
gcttgacggcaaaaggaccctttcaatcaaagagaatttggtcgctgaggctggaaaaaatctggatgtgtttaacttttagggcttactatttttgagaggtggtctgacatagactatccacaattcagcgccaggtctcagggagcgacctaccccaaggtggggagttcgttccttttccagtaacgaggagggcaaactcatattccatcatgatggaagaggacatggaaaatggaaggtcgtatcaagaaagaccaaggactttttcaacagtacgaagcaagtcatctatcccgctggccttacgtttgttgatgaggataaatccccgtgccttgattattctttctcttttggtattcagtggtgtgctatatgtgggagccagtacatcaccaattgtggtctttgtgttctgtatatgtactctcagtctattcttctctctctaccttacaaagtgggttcttgctaaggacgaaggaccaccagaaatgtctgagatatctgatgccataagagatggtgctgaagggttttttaagacacaatatggaactatttctaaaatggcatttattctggcctttgtcatccttggcatttatctctttcgcactactaccccacagcaggaggcgtctggcttgggaagggcaacactagcctatattacagttgcttcttttcttcttggagcattatgttctggaatagctggctttgttggaatgtgggtgtctgtgcgtgcaaatgtacgagtttcaagtgctgctcggcgctctgcaagggaagcattgcagattgctgtccgtgctggtggtttctcagccatcgtagttgtttgcatggctgtatttggcgtggcaatattgtactcaacattttatgtttggcttggagtagattcacctgggtcaatgaaggttactgacttgcctcttctccttgtgggatatggttttggtgcctcttttgttgccctttttgctcagttgggtggtggaatatacaccaaagctgctgatgttggagctgatctggtcggaaaagttgagcagggaatacccgaagatgatcctcgtaacccagctgtcattgctgacttggttggtgacaatgttggagattgtgctgcccgaggcgctgatctttttgagagcatagcagcagaaattatcagtgcaatgatacttggaggaactatggcacaacgctgtaaaattgaagatccctctggctttattttgtttcctcttgtcgtccattcatttgatttggtggtgtcatcagttggaattctctcaatcagaggaacacgtgactctggactcatttctcctatcgaagatcccatggcaattatgcaaaaaggctactctgttactattatgcttgctgttcttacgtttggggcgtctactcgttggcttctgtacacggaacaagcaccttctgcatggctgaattttgcattgtgtggcttggtggggatcgtcacagcatatgcttttgtttggatttcgaagtattacacggattataaacacgagccagtccggcttttagctctttcgagttccacaggacatggaactaatattattgctggagtaagcttgggaatggaatcaacagcactaccagttctagtgataagtgttgccattatatcagcatattggctggggcagacctctggcttggtggacgagtctggcaacccaactggtggtctttttgggacagctgtagcaacaatggggatgcttagcactgcagggtatgttctcaccatggacatgtttggtcctatagctgacaacgctggtggtattgttgagatgagccagcagcctgaaagtgtgagggaaatcacagatgttctagatgctgtgggcaacacaactaaagctactacgaaaggatttgccatagggtcagcagctctggcttccttcctcctgtttagtgcatatatggatgaagtagcttcttttgctcaattgccattcaaggaggttgatatagcagtcccagagatttttgttggtggtttattaggctcgatgcttatattcctgttcagtgcatgggcttgctcagcagttggcaaaactgcacaggaagttgttaaagaggtcaggagacaatttattgagaggcctggtatcatggactacaaagagaagccggattatggacgctgtgttgcaattgtggcatctgcatccttgagagaaatgataaagcctggagctctagcaattatatcacccatggccgttggcgttgtcttccggattttgggccactacactggtcagcctcttcttggagctaaagttgtagcctccatgctgatgtttgcgacggtcgctgggattctcatggcactcttcttgaacactgctggcggcgcctgggataatgcaaagaagtacattgagactggcgctcttggtggcaagggcagcgagtcccacaaggctgcggttactggcgacacggttggagacccattcaaagacactgctggaccgtcgctgcatgttcttatcaagatgctcgccacaatcacgctggtcatggctccgatattcttgtgattaaccaaccactcatcaagcttgctattaaccctgcggagatgtacctatgcgaccaggtagatgaggtgtgtgtgtgtgtgtgttacctgcatgtgatgatgtaacggtccaatcggtttgtgtcacgacatgctgtacccagagaaagaagcggcgatctatacccatgtctcacggtagatattatactgatgatgcaaatgccgtgttttgttactgaattagtggcctgaaagttgcgcttgttgattgatgaaacattatggtagcgtacttgtatgctgcatcccacaatggattttatgatgtggaccccgaatgttttgcttaaaaaaaaaaaaaaaaaaaaaaaaaaa

SEQ ID NO: 4503 - DNA, 3048 bp, Oryza sativa Japonica Group
agatctccccacgttccgtctcctgcctgcgccgccgcgccgatctccatcgccgccgccgccgccgccgccgccgccgacgagcagcggcgccggtgccggcgccgcgccgcacacactcccccctcctactcctccttgcgccgggccccaagtctcgtcttctcggcctcgactcccggaggtctctcctcgctcgctagctctcccgcctcgcctcgccccccaccgcacctcgacttccatccatccatccccgcgacgggagcggcggtgggtggccgtgctgcacgtcgcccttctgcttccgcctccgggagaagtgaaagttgcggagctagggctaaagggggatccacttggtattcttggctccaaagctgtctgggtagggaccgtccaaaattcagcgaccgggatccgggggcgacctgccccagggtggggagatcgctccttttcctgtgacaaggagggcgaactcttattcagccatgatggaagcggacatggagaacgggaggttgtatccggagagacccagaactttctctaccgtacgaactaaatcatctctgccaccgatcttccgtgtgttgatgaggataaatccccgtgctttcattgttcttcttcttttggtattcagtggtgtgctctatgtaggagccagtacatcaccaattgtgctctttgtgttctgcatatgtactctaagtttattcttctctctctacctcacaaagtgggttcttgccaaagatgaaggtcctccagaaatgtctgagatatctgatgccataagagatggtgctgaaggattttttaggacacaatatgggactatttctaaaatggcttgtatcctggcacttgtcattcttggcatctatctctttcgttccaccaccccacagcaggaggcatccggtgttggaaggacaacatcggcatatattactgttgcttcctttctccttggagctttatgttctgggattgctggttttgttgggatgtgggtatccgtacgtgcaaatgttagagtttcaagtgctgctcggcggtctgcaagagaagcactgcagattgctgtccgcgctggtggtttctcagccattgtggttgttggcatggctgtttttggtgtggcaatactgtatgcaacattctatgtttggcttgaagtagattcacctggttcaatgaaggttactgatctgcctcttctccttgtgggatatggttttggtgcgtcttttgtcgccctttttgctcagttgggtggtggaatatacaccaaagctgctgatgtcggagctgatcttgtgggaaaggttgagcagggaataccagaagatgatcctcgtaatcctgctgtcattgctgacttggttggtgacaatgttggagattgtgccgcacgaggggctgacctttttgagagcatagcagctgaaattatcagtgcaatgatactcgggggaacaatggcacaacgctgcaaaattgaagatccctcaggctttatactgtttcctcttgttgttcattcatttgatctggtgatctcatcagttggaatactctcaattcggggaacacgtgactctgggttaatatcccctattgaagatccgatggcaatcatgcagaaaggatattctatcactatactgctcgctgttgttacctttggagtgtctacccggtggctcctgtacactgaacaagcaccttctgcatggctcaattttgccttgtgtggcttggtgggcatcatcacagcatatgcttttgtttggatttctaagtattacacagattacaaacatgagcctgtccgccttttggctctttcaagttccacagggcatggaactaatattattgctggagtaagcttgggactggaatcaacagcgttaccagttctagtgataagtgtagccatcatatcagcattttggttggggcatacatctggattagtagatgaatctgggaacccaactggtggtctttttgggacagctgtagctacaatggggatgcttagcacagcagcatatgttctcaccatggacatgtttggtccaatagctgacaatgctggtggtattgtggagatgagtcagcagcctgaaagtgtaagagaaatcacagacattctagatgctgtgggcaatacaacaaaagctactacaaagggatttgctattgggtcagcagcactggcttcctttctcctgttcagtgcatatatggatgaagtagctgctttcgcacaattgccattcaaagaggttgacatagcaatcccagaggtttttgttggtggtttacttggttcaatgcttatattcctgtttagtgcatgggcttgttctgctgttggcagaactgcacaagaagttgttaacgaggtcaggagacagtttattgagaggcctggcattatggactacaacgagaagcctgattacggtcgttgtgttgcaattgtggcatctgcttccttgagggaaatgataaggccgggggctttagccattatatcacccatggctgttggtattatcttccgtatgttgggtcacgctactggccggcctcttcttggagccaaagttgtagccgctatgcttatgtttgcaactgtttctggtattctcatggcactcttcttgaacactgctggtggtgcctgggataatgctaagaagtacatcgagactggcgctcttggtggcaaaggcagtgagtctcacaaggctgcagttactggtgatacggttggagatccatttaaagacacggcggggccttccatccatgttcttattaagatgctcgctacaatcacattagtgatggctccaatattcttgtgattaaccatgaatgtatcacaactaatcctgcggcgaagttatcaaagggtcctgtaggtgagctgtttacgtgagtgggatgtattgattcgctagctttgtgtttattttgcccgattaaagagaatcactactgcccattttgatagtgtcc

SEQ ID NO: 4504 - DNA, 3148 bp, Hordeum vulgare subsp. vulgare
ggtcagacggcccgcaacgagctccgttttcctcccagcccccctcccgtcccgacctttctctcccccgcatctccactccaaccgcatcgcacccctccctcccatctcccctccctccacccagctcagtgcgcgcgacgacgcgtggggccgcgaccgccggcggccgcgccgacgaacgggaccgccactgccgccagcgccggtgaccgcgcggggcgacgaggcgggcacggcagcgaccggaacgcgaccgcgtcaacgaggggagatctcgggcggccccgcggaggagcggcggcagcgttgggctctacttctcttcattcccgtcgacgtttggctgactggcttccgccccaccgaaagccctaggtgtttgatacagaccatccaaaattgagcgcccagtatctgggagtgacctgccccaaggtggggagttcgctccttttctagtaacgaagagggcaaactcttattccatcatgatggaaagtgaaatggaaaaaggaagaccgtatcaggagaaaccaagaactttttccactgtacgaagtaaatcatctataccgctggtcttccgtgtgctgatgaagataaatcctcgtgccctgatagttgttcttctgctggttgtctgtggtgtgttctacttaggagccagtacatcaccaattatagtcttcgtgttctgtatatgcactctcagtttattcttctctctctacctcacaaagtgggttctcgccaaggatgaaggacctccagaaatgtccgagatatctgatgccataagagatggcgctgaaggattttttaggacacagtatggggctatttctaaaatggctggcatcctggcacttgttatccttttcatttatctctttcgcactaccactccgcagcaggaggcatcaggcctaggaaggacaacatctgcatatattacagttattgcctttctccttggagctgtgtgttctggattagctggatatgttgggatgtgggtctccgtacgtgcaaatgttagagtttcaagtgctgctcgacggtctgcaagggaagcattgcagattgctgtccgtgcaggtggtttctcggccatcgtagttgttggcatggctgtatttggtgtggcattactctatgcaacattttatgtttggcttggagtagattcacctgattcgatgaaggttacagacttgcctcttctccttgtggggtacggttttggtgcatcgtttgttgccctttttgctcagttgggtggtggcatatacaccaaagcagctgatgttggagctgatcttgttggaaaggttgagcagggaataccagaagatgatcctcgtaatcctgctgtcattgctgacttggttggtgacaatgttggagattgtgctgcccgtggcgcagatctttttgaaagcatagcagcagaaattatcagtgcaatgatacttggtgcaacaatggcacagcgctgcaaaattgaagatccctctggctttattctgtttcctcttgttgtccattcttttgacctagtggtgtcatcagttggaattctctcaattaggggaacacgtgactctggattaatatcccctattgaagatcccatggcaattatgcagaaaggctattctattactatactgcttgctattcttacctttggagggtctactcgttggctcctgtacactgaacaagcacctactgcatggttcaattttgccttgtgtggcttggtgggcatcatcacagcatatgcttttgtttggatttccaagtattatacagattataaacatgagcccgtccgccttttagctctttcaagttccacaggacatggaactaatattattgctggggtaagcttgggaatggaatctacagcattgccagttctagtgatatctgtagccattatatcagcattttggttgggacgtacctgtggcttggtagatgagcttggcaatccaactggtggtctttttgggacagctgtagctacaatggggatgcttagtactgcagcatatgttctcaccatggacatgtttggtcctatagctgacaatgctggtggtattgtggagatgagtcagcagcctgaaagtgttagagaaatcacagacattctagatgctgtgggtaacactacgaaagctaccacaaagggatttgctatagggtcagcggcactggcttcctttctcctgttcagcgcatatatggatgaagtagctgcttttgcacagttgccattcaaagaggttgacatagcaattccagaggtttttgttggtggtttactaggttcgatgcttatattcttgtttagtggatgggcttgttcagccgttggcagaactgcacaagaagttgttactgaggtcaggagacaattcattgagaggcctggaatcatggactacaaagagaagcctgactatggtcgttgtgttgcaattgtggcctctgcatccttgagggaaatgataaagccaggggctttagcgattttgtctcccatggctgttggcatcatcttccggattttgggccatgctaccggccagcctctccttggagctaaagttgtcgcctctatgctcatgtttgcgaccgttactggtatccttatggcgctcttcttgaacacctctggtggtgcttgggataatgctaagaagtacatcgagactggtgcacttggtggtaaaggcagtgaggctcacaaggctgcaattactggtgatacggttggagatccattcaaagacacggcggggccttcgatccatgttctcatcaagatgctcgccacgatcacactggtcatggctccgatctttttgtaatcatcggtcgagctcgcagttaaccccgcagagaaatatctatggttattgtagatgaggcattaacgtgaatgggatgtaatgattcgcttttagtattgttttgccacattgaaaggagaggttcagtgctgcccattttgatggtgcccgtattttaccgttgctatttggacaaaaggatgcagacgttggagaatatatatgctgtgacagagattagaatggacttgaaaattcatatgccttgtatgcac

SEQ ID NO: 4505 - DNA, 2839 bp, Arabidopsis thaliana
ggatttacggtgacaacagacagagagagtggagaacgcttcttcggctaggacgacaagcttcgagttgatggcggttttcttctgaccattctctgaaactaatcttctcttatgctgaaaactatatatgggaggtgtttctctcggagtcaataccgacgtatcaagattcagcgtccaagttctggggctgagctgccccgtagcacgggttttatacctcttccccttgttcggagggcaaattcgttacaaaacatgatgatggatgaagatgttgagcaggccactctggtttcttacagtgacaagccaaggaccttcccggatatgcgtagtaaaacttacagtccattgataatccgcattctgagaaatttaaatgttcgtgccctttctgtacttctgcttttgagctttggagggatcttttacatgggagcacgtacttctcccatcattgtgttcgtctttgtagtatgcatcatcagtttcatgttgtcagtatacctgaccaagtgggtattagccaaagatgaaggacctccagaaatggttcagatatcagatgctatacgtgatggagctgaaggatttttaagaacgcagtatggtactatatccaaaatggcgttcttgctagcttttgtgatcctttgcatatacttgttccgtaacttaaccccccagcaagaggcttctggtttaggaaggacaatgtctgcatacattactgttgctgcatttcttttgggtgcgctatgttcaggtattgctggatatgttggaatgtgggtgtcagttcgtgctaatgtacgggtttccagtgctgctagacgatccgcaagggaagcattgcagatagctgttcgtgctggtggattctcagctctggttgttgttggtatggctgtgattggtattgccatcctgtattctacattttatgtatggttggacgtggattcacctggctcaatgaaggttactgatctgcctcttcttcttgtgggatatggttttggtgcatcatttgttgccttatttgctcagttgggtggtggaatatatactaagggagctgatgtcggggcagatctggtcgggaaagttgagcacggtattcctgaggatgaccctcggaaccctgcagttatagctgatttggttggagacaatgttggggactgcgctgctcgaggtgctgatttatttgaaagtatagctgcagaaatcatcagtgcaatgatacttgggggtacaatggctcagaagtgcaaaattgaagatccatctggttttattttatttcctctagttgttcactcgtttgacttggtaatatcatcaattggtattctatcgatcaaaggaactcgcaatgctagtgtgaaatctccagtagaggatccaatggttgttcttcagaaaggatattcgctgactattatattagctgttttgacatttggcgcgtcgactcgctggctgctatacacagaacaagctccatctgcttggttgaatttcttcatgtgtggcttagttggcattatcacagcctatgtctttgtctggatatccagatattatactgactataagtatgagcctgttcggacgttggctcttgctagctccactggtcatggaaccaatataattgctggggtcagcttgggtctggaatccacggctcttcctgttttggttataagtgtagctatcatttctgctttttggctgggcaatacctcgggactaatagatgaaaagggaaaccccactggaggtctatttggaacagctgtagctacaatgggaatgttgagcactgcagcttatgttcttacaatggacatgtttggtcccatagctgataatgcaggtgggattgttgagatgagccagcagccagaaagtgtccgtgagatcactgatgttcttgatgctgttgggaataccacaaaagcaacaacaaaagggtttgctattggatctgctgcccttgcatcattccttctttttagtgcgtatatggacgaggtttcagcgtttgctaatgtatcttttaaagaggttgatattgcgatcccagaagtcttcattggagggttattaggtgccatgcttatattcctgtttagcgcttgggcttgtgcagcagttggtcgaactgcacaggaggttgtcaacgaagtaagaagacagttcattgagaggcctggcataatggactacaaggagaagccagattatggtcgatgtgtcgccattgtcgcatcttcagctttgagggaaatgataaaaccaggagctttggctataatatcacccattgcagttggttttgtgttccggatcttgggatactacactggacaacctttgcttggagctaaagtagtagctgcaatgctaatgtttgcgacagtatgtggtatcttaatggctctattcttaaatacagcaggaggtgcttgggacaatgcaaagaaatacattgagactggagctctaggaggcaaaggaagtgattcccacaaagctgcagtaactggtgatactgtgggagaccctttcaaggacacagcaggaccgtcgattcacgttctcatcaaaatgttggcgactatcacgcttgtcatggctcctatctttctctgaaaaaagacatctaatcctttttgcacatatatagagtgagtgaggtaggtttatgaattcatgcaatatggttaagtggtatatgtttttcctctcctctgaaaagagagtatcgtagttggtcttaaatcaatgatcctgagcacttcacagtgacatcttacatttt

SEQ ID NO: 4506 - DNA, 2744 bp, Vitis vinifera
atggatgacgatgtggagagtggtgctttggggccttaccaagataagccaaggattttccccaacatgcggagtaaatcttacaccccattgatttttcgaattttcatgggaataaatgtccgtgtgctttttgtacttctgctcttgggcttgggagctgttttttatgttggggcaagaacttctccaatccttgtgtttgtcttctcagtgtgcatcatcagcttccttttatcagtctatcttactaaatgggtactagcgaaggacgaggggcctcctgagatggctcagatatcagatgcgatacgtgatggagcagaaggtttcttcaggacccaatatgggactatttccaagatggcaatgttactagctcttgtgatccttagcatatatttgtttcgcagtacaactcctcaacaagaatcttctggcataggaaggtcaacaactgcatatattactgttgctgcctttctcctaggggctctttgttcaggaattgctgggtatgttggaatgtgggtgtcggtacgtgcaaacgttcgagtctcaagtgctgcaagacggtctgcaagagaagcattgcagatagctgttcgtgctggtggtttctctgcccttgttgttgttggtatggctgtaattggtgttgccatcctttatgccacattttatgtttggttgggcgtagattcgacaggttcaatgaaggttactgatttgcctcttcttcttgtgggatatggatttggagcttcatttgttgccctttttgctcagttgggtggtggaatatatacaaaagcagcagatgttggagctgatctggttggaaaggtggagcagggaatacctgaagatgatcctcgaaatcctgctgtcattgcagatttggttggagacaatgttggtgattgtgctgctagaggtgctgatctgtttgaaagtattgcagctgaaatcatcagtgctatgatactgggtggaacaatggctcaacgttgcaagattgaagatccatctggtttcatcctgtttcctcttgtcattcactcttttgacctggtaatatcatcggttggaatattttcaataagggggacacgtgactctggagtgaagtcacctgtcgaggatccaatggcaattcttcagaaaggatactccattacaataattttagctgttttgacatttggcttgtctacccgttggctactttacaccgaacaagcaccttctgcttggatgaactttgccttatgtggattagttggaattatgacagcttatgtttttgtctggatcaccaagtactatactgactacaagcatgaacctgttcgcactctagctctttctagctccacagggcatgggaccaacataatagcaggtgtcagtttgggtctggaatctactgctcttcctgtcatcgtcattagcatatctattgtctcagctttctggctcggccaaacttcgggcctagtggatgaaactgggaacccaactggtgggctgtttgggactgctgttgcaacaatgggaatgctgagcactgctgcctatgttctaactatggatatgtttggtccaatagctgataatgctggtggaatagtagagatgagtcagcagcctgaaagtgttcgggagatcactgatcttcttgatgcagttgggaacaccacaaaagctaccaccaagggattcgccattggatccgcggcactcgcatccttccttctgttcagtgcttatatggatgaggtgtcagcatttgctcatgaaccttttaagcaggttgatattgccattccagaagtttttgttggtgggttgttgggctctatgcttattttcctatttagtgcatgggcatgttctgcagttggccggactgctcaagaggttgtcaatgaagtaagaagacagtttattgagaggccaggtatcatggactataaagagaaaccagactatggtcgttgtgttgccattgtagcatctgcatctctgagggagatgataaaacccggtgctttggctattgtatcacctatagtggttggctttctgttccggattttgggatactacaccggacatcctctactcggggctaaagttgtggcttcaatgttgatgtttgcaacagttgcgggtatacttatggcccttttcctgaacacagctggtggtgcctgggacaatgcaaagaagtatatagagacgggcgcgcttggaggcaagggaagtgatgcccacaaagctgcagttaccggagacactgtgggagaccccttcaaagacacggctggaccgtcgctccatgttctaatcaaaatgttggcaaccatcactctggtcatggcaccggtctttctgtgagaagaattgaggctatatttaatctattttggtaaatacggtacccattgctctcttcgaatcattttgatatcttcttgcaaatatacagagataggtggatgtaactcaattagagtgcctgaattttctttcttttaacttgaaataagagatgttcaatagttagcttttatcaacattcttttataaatatgcagctaagtgtccggattgatggatcagtagatcagtttaaacccttaaaaacgccatgtcagagcaatcgtaagagtcgggagaaagtgtatggcttttgatcaaatcatcaaacccagtaatgtattcttttctattgttta

SEQ ID NO: 4507 - DNA, 3393 bp, Arabidopsis lyrata subsp. lyrata
gtagcaaagttaatttaggaaaaaaatattccgaaagttctctgaaaagtcttcggatttagaacggagacagagagaggagagagcgcttcttcggctaggacaagctttcgctaatggcgctttccttctgatcactcaccggagccgtcatcttctctgtttttactgatttttaggaattgtgtttatagtgggaactttgttgtggcaactctactgagaaagtttgaagaagctggaatcaagatatagctagagttaagagggttcatactaacttgtgttcgcttttcgatgtgctgttaacatttggagagtgtatcaacattcagcgtccgaattctggggctgagttgccccatagcactgattttacgcctctacccatagtccgaagggcaaattcagctcaaaacatgatgatggatgaagatattgagcaggccagtttgatgtctttcaatgacaggcctagggcttttcctaacatgcgtagtaaaacctatagtccactgatattccggattcttaggaaattaaatgtccgtgtcctttcgataattctgcttttctgctttggagcgatcttttacgtgggagcaagtacttctcccataatcgtgttcgtcttcgcagtatgcatcatcagctttcttttgtccatatatctaaccaagtgggttttagcgaaagatgaaggacctccagagatggttgagatatcagatgctatacgtgatggagctgaagggtttttcagaacgcagtatagcactatatccaagatggctgtcttgctagcttttgtgattctttgcatatatctattccgtagcttaactccccagcaagaggctgctggtttaggaagggcgatgtctgcctatattactgttgctgcatttcttttgggggctctatgctcaggtattgctggatatgttggaatgtgggtgtcagttcgtgctaatgtgcgggtctccagtgctgccagacgatctgcgagagaagcattgcagatagccgttcgtgctggtgggttttcagccctggttgttgttggtatggctgtgattggtatcgccatcctctattctacattttatgtttggttgggcgtggattcaccaggctcaatgaatgttactgacctgcctctgcttctcgtgggatatggttttggtgcttcgtttgttgccttatttgctcagttgggtggtggaatatatactaagggagctgatgttggggcagatctcgttgggaaagttgagcagggaattcccgaggatgatcctcgaaatcctgctgttattgctgatttggttggagacaacgtgggggactgtgctgctagaggtgctgatttatttgaaagtatagcggcagaaatcatcagtgcaatgatactaggtggaacaatggctaagaagtgcaaaattgaagatccatcaggctttatcctttttcctctagttgttcattcttttgacttgattatatcatcaattggtattctatcaatcaagggaacacgtgatgccagtgtgaaatctccggtagaggatccaatggctgtacttcagaaaggatattctctgactattatattagctgttttgacatttggcgcgtcgactcgctggctgctttacactgaacaagctccatctgcatggttcaatttcgccctatgtgggttggttggcatcatcacagcttatatctttgtctggatatccaaatattatacagactataagcacgagcctgttcgaacgttggctcttgctagctcgactggtcatgggactaatatcattgctggggtcagcttgggcctggaatcaactgctcttccagttttgactataagtgtagctattatttctgcgtattggctgggcaatacctcgggactagtggacgaaaatggcattcccactggaggtctatttggaacagccgttgctacaatgggaatgctaagcactgcagcttatgtcctaactatggacatgtttggccccatagctgacaatgctggtgggattgtcgagatgagccagcagccagaaagtgtccgtgagatcactgatcttcttgatgctgttgggaacaccacaaaagcaacaacgaaagggtttgccattggatctgctgcccttgcgtcattccttctctttagtgcgtatatggacgaggtttcagcgtttgctaatgtgtctttcaaagaggttgatattgctatcccagaagtgttcgtaggtgggttattgggttccatgcttattttcctctttagtgcttgggcatgcgcggcagttggtcgaactgcacaagaggttgtcaacgaagtaagaagacaatttattgagaggcctggcataatggagtacaaggagaagccagattatagtcgttgcgtcgccattgtcgcatctgcagctttaagggaaatgataaagccaggagctttagctattgcatcacccattgtagttggtttggtttttcggattttgggttactacacaggacaacctctgctcggagcaaaagttgtagcttctatgctcatgtttgcaacagtttgtggtatcttgatggcacttttcctaaacacggcgggaggtgcttgggacaatgcaaagaaatacatagagactggggcacttggggggaaaggaagtgaagcccacaaagcagctgtgactggtgataccgtgggagatccgttcaaggacacagccggtccatccattcacgtcctcataaaaatgctcgcgactataactctcgtcatggctccggttttcctctgaaagtgaaccgttacttatccatcccggcttatatactctcttgcacatatacaaatagagagggagagagacaattgtctactcgatagtctaatgaggcggcggttgttgcgattgctgccttgatggtggtggttgtgtttgcttcctaatcttcttcttctctgctttggtctaatgttgtttattcgactgggactgttcgatgaacttgattcgccatcacttgggtaatcatacatcgtagcttctatatcactgagacgttttctgcgatggcggacccgttttatgttagtcaaactgtgccacaaacaactaaccatctctccaatggcgaagcagtacgctgcacaagcggcacatgacattttgcagatgcttttaacaacgcactggcaaattccaagcttgaacaggagggtgatgaacatcaaaactgaacagaaaaagaaacaaatacaaaattatagaaaacaaaggaaagttgacagaaaccatagtgattgctaaaaatcggaaataagagaaaggtctacttacttatgaaacagaggcttgacat

SEQ ID NO: 4508 - DNA, 3093 bp, Arabidopsis thaliana
gtgaaaataaaattaaaggtagaaaaattaatttaggaaaaaaatattcggaaagttctgtgaaaagtcttcggatttagaacggagacagcgagaggatagagcgcttcttcggctacaacaagctttcgctaatggcggtttccttctgatcactctcaccggagccgtcatcttctctgttttaccgatttttaggaaattttgattgtggtggaaacttgttgtggcaactctactgagaaagtttgaagaagctggaatcaaagatatagctagagttaagagggttcatactaacttgtgctcgttttgtgatgtgctgttgttaacgtttggaggaaaaagttgtagtgtattaaaattcagcgtccgagttctggggcggagttgccccatagcattgactttacgcctctacacatagtccgaagggctaattcagctcaaaacatgatgatggatgaagatgttgagcaggccagtttgatgtctttcaatgacaggcctagggcttttcccaacatgcgtagtaaaacctatagtccactgatattccggattattaggaaattaaatgtccgtgtcctttcgataattctgcttttctgcttcggagcaatcttttacatgggggcaagtacttctcccatcatcgtgttcgtcttcacagtatgcatcatcagcttccttttgtcaatatatctaaccaagtgggttttagcgaaagatgaaggacctccagagatggttgagatatcagatgctatacgtgatggagctgaaggttttttcagaacgcagtatagcactatatccaagatggccattttgctagcttttgtgattctttgcatatatctattccgtagcttaactccccagcaagaggctgctggtttaggaagggcgatgtctgcttatattactgttgctgcatttcttttgggggctctatgctcaggtattgctggatatgttggaatgtgggtgtcagttcgtgctaatgtgcgggtctccagtgctgccagacgatctgcgagagaagcattgcagatagccgttcgtgctggtgggttttcagccctggttgttgttggtatggctgtgattggtatcgccatcctctattctacattttatgtgtggttgggcgtgggttcaccaggctcaatgaatgttactgacctacctcttcttcttgtcggatatggttttggtgcttcgtttgttgccttatttgctcagttgggtggtggaatatatactaagggagctgatgttggggcagatctcgttgggaaagttgagcagggaattcccgaggatgatcctcgaaatcctgctgttattgctgatttggttggagacaatgtgggggactgtgctgctagaggtgctgatttatttgaaagtatagctgcagaaatcatcagtgcaatgatactaggtggaacaatggctaagaagtgcaaaattgaagatccatcaggctttatcctttttcctctagttgttcattcttttgacttgattatatcctcaattggtattctatcaatcaagggaacacgtgatgctagtgtgaaatctccggtagaggatccaatggctgtacttcagaaaggatattctctgacaattatattagctgttataacatttggcgcgtcgactcgctggctgctttacactgaacaagctccatctgcatggttcaatttcgccctatgtgggttggttggcatcatcacagcctatatctttgtctggatatccaaatattatacagactataagcacgagcctgttcggacgttggctcttgctagctcgactggtcatgggactaatatcattgctggagtaagcttgggcctggaatcaactgctcttccagttttgactataagtgtagctattatttctgcgtattggttgggcaatacctcgggtctagtggacgaaaatggtattcccactggaggtctatttggaacagccgttgctacaatgggaatgctaagcactgcagcttatgtccttactatggacatgtttggccccatagctgacaacgctggtgggattgtcgagatgagccagcagccagagagtgtccgtgagatcactgatcttcttgatgctgttgggaacaccacaaaagcaacaacgaaagggtttgccattggatctgctgcacttgcatcattccttctctttagtgcgtatatggacgaggtttcagcgtttgctaatgtgtctttcaaagaggttgatattgctatcccagaagtgttcgttggtggattattgggtgccatgcttattttcctctttagtgcttgggcatgcgcggcagttggtcgaactgcacaagaggttgtcaacgaagtaagaaggcaatttattgagaggcctggcataatggagtacaaggagaagccagattatagtcgctgtgtcgccatagtcgcatctgcagctttaagagaaatgataaagccaggagctttagctattgcatcacccattgtagttggtttggtgtttcgaatcttgggttactacacaggacaacctctgctcggagcaaaagttgtagcttctatgctcatgtttgcaacagtttgtggtatcttaatggcacttttcctaaacacggcgggaggtgcttgggacaatgcaaagaaatacatagagaccggggcacttgggggcaaaggaagtgaagctcacaaagcagctgtgactggtgataccgtgggagatccgttcaaggacacagccggtccatccattcacgtcctcataaaaatgcttgcgactataactctcgtcatggctccggttttcctctgaaagtgaaccgttacttatccatcccggcttatttactctcttgcacatatacaaatagagagggagagaggttggttataaaatgatttacatggattaatggtttttgtgtttcatttcatctgaataaatgagataattctgtttttgagtttagagacactctttaaggaattctagagacattttaatcaaccacatctttgactttgagagtctttattttcctcg

SEQ ID NO: 4509 - DNA, 1502 bp, Zea mays
cgtggaccccttgattcccggcgtttatgccatgggctgatgggcgtggacggacggacaggccccgggtgctcgtcgctggggtacggcgccatggaggagctgggcccgttccgggtgaagagcgacggcaagacgctgtaccgcaacccgtacgcgtggaacaacgcggcaaacgtgctgttcctggagagccccgccggcgtgggcttctcttactccaacacgacggctgactacagccggagcggcgacaacaagacggccgaggacgcgctccggttcctgctcaactggatggagaagttccccgagtacaagggccgcgacctgtacctggccggagagagctacgccggccactacgtcccgcagctcgcccacgccatcctcgggcacgccgccgccggcaagccgtcgtcgtcgtcgcccctcaacctcaggggcatcatgatcgggaacgcggtgatcaacgactggacggacaccaagggcatgtacgacttcttctggacgcacgcgctcatctccgacgcgacggccgacgcgatcggcaggcactgcaacttcagcgccgccgccgacgccgacgccgcggcctccaacgacaagtgcaacgaagcgacgtcggaggccgacgaggccctgcaggacatcgacatctacaacatctacgcgcccaactgccagtcccccggcctcgtctcgccgcccatcaccccctcgatggacaggtttgacccgtgctcggattattacgtgaacgcgtacctcaacgacccggacgtgcagagggcgctccacgccaacgtcacccgcctcgaccacccctggtccgcctgcagcgatgtcttgagacgctggactgacagcgccacgaccgtcctgcctattctcacggagctcctcaacaacgacatcagggtctgggtgtacagtggagacaccgatgggagagtgccggtcacttccagcaggtactccgtgaaccagctccagctcccagttgccgcaaaatggagggcatggttcagcagcactcagggcgccggagaggtgggcggctacaccgtgcagtacaagggcaaggagaagggcagcctcagcctggtcaccgtcagaggagccggccacgaggtgcccagctaccagccaaggcgagcgctcgtgcttgtccagggtttccttgcaggcaaaacgcttcctggctgcaaaacgtgcgagtcggcttagcggttggcagcactacagcaacatgtatctgagagcgagggagagaaagcgaaagggaatcaagccattggaaacacacgcaccttgcggatcatgtaactgcaggtctgcaaaaaaaaaaggcaattatacagtcatagtcacaggcagagaaatctgtacacgaaataagtaagtaggttatgttccatggtgtatttagtgtgctaatttgatgccataaatctcagtcgtgcaggtgcatcagtgctagcgaatcattagaaaca

SEQ ID NO: 4510 - DNA, 1336 bp, Oryza sativa Japonica Group
caaggaggcggaccgcgtggcggggctgccggggcagccggccggcgtgggcttcgcgcagtacgccgggtacgtgacggtggacgcggcggcggggcgcgcgctgttctactacctcgccgaggccgacggcggcgccgccgcgtcgtccaaggcgcccctcctcctctggctcaacggcggccccggctgctcgtcgctcgggtacggcgccatggaggagctcggcccgttccgcgtcaagagcgacggcgtgtcgctctaccgcaatccctactcctggaacaacgtggcgaacgtgatgttcctggagagcccgatcggcgtggggttctcgtactcgaacacgacggcggactacagccggatgggggacaacagcacggcggaggacgcgtacaagttcctcgtcaactggatggagcgcttcccggagtacaagggccgcgacttctacctcgccggcgagagctacgccggccactacgtcccccagctcgcccacgccatcctccgccactcctccgccgccgccggcggcaagccctcctcctcgccgatcaacctcaaaggcatcatgattgggaacgcggtgatcaacgactggacggacacaaaggggatgtacgacttcttctggacgcacgcgctcatctccgacgaggccaacgacggcatcaccaagcactgcaacttcaccgacggcgccgacgccaacagcctctgcgacgacgccaccagcctcgccgacgactgcctccaggacatcgacatctacaacatctacgcccccaactgccagtcgcccggccttgtcgtctcgccgccggtcaccccctcgattgagagctttgatccgtgcacggattactatgtggaggcctacctcaacaaccctgatgtgcaaaaggcgctgcacgcaaacatcaccaggcttgatcacccgtggtccgcttgcagtggagtcttgagacgctgggtcgacagcgcttcaacggttctgcccattatcaaggagctcctgaagaacaacatcagagtctgggtgtacagtggagacactgatgggagagtacctgtcacttccagcagatactctgtcaaccagctcaaccttccagttgctgctaaatggagaccatggtttagcaacactcagggtgttggagacgttggtggatacattgtgcagtacaaggggaacctcagccttgtaaccgtgagaggagcaggccatgaagtccccagctaccagccacagcgagcgcttgtgcttgtccagtatttccttgaaggcaaaacgctacctgattgcgaaaaatgtggagaggcttag

SEQ ID NO: 4511 - DNA, 2833 bp, Sorghum bicolor
caggagccgagaatctctaaaaggcgccgctgcctggccgctcccgtccacgccgcggcgggcagctagcagcgaagcgtcggcttccagaggccggccgcccggtcgtcgagagccagccagtggtggaggtggagggaggctaggtatatagctaccggagagccggtgggcgcgggagaaaggatcggagagccaagggggagatagcttagagatggcgccgtcgcggaagtcgccggtggtggcggaggagcgggcggggatggaggaggggaagggggagcggtgcgcggtggaggaggtggcgctggtggtgccggagacggacgacccgtcgctgccggtgatgacattccgggcgtggacgctggggctcggctcctgcgtcgtcctcatcttcctcaacaccttcttcacgtaccgcacccagccgctcaccatctccgggatcctcgcacagatcctcgtgctccccgccggccgcttcatggccgccgtgctgcccaaccgcgaggtcaggctcctcggcggcaggctcggcagcttcaacctcaacccggggccattcaacgtcaaggagcacgtcatcatcaccatcttcgccaactgcggcgtctcctacggcggcggcgacgcctactccatcggcgccatcaccgtcatgaaggcctactacaagcagacgctcagcttcgcctgcgccctactcatcgtcctcacgacacagatactggggtacggctgggctgggatgctgaggaggtacctggtcgaccctgccgagatgtggtggccttctaatcttgcccaggtctcactcttcagggcgctgcacgagaaagaagaggagggcggcaagtcccgtggcccgtcgcggatgcgcttcttcctgatcgtcttcttcgcgagcttcgcgtactacgcgctgccgggctacctgctgccgatcctgaccttcttctcgtgggcgtgctgggtgtggccgcacagcatcacggcgcagcaggtcgggtccgggtaccacggcctcggcgtgggcgccttcacgctggactgggcgggcatctcggcgtaccacggcagcccgctggtggcgccgtgggcgtccatcgccaacacggccgtgggattcgtcatgttcatctacgtcatcgtgccgctctgctactggcagttcaacacgttcgacgcccgcaggttccccatcttctccaaccagctcttcacggcgtcggggcagaagtacgacaccaccaaggtgctcaccaaggacttcgacctcaacgtcgccgcctacgacagctacggcaagctctacctcagcccgctcttcgccatctccatcggctccgggttcctgcggttcacggccaccatcgtccacgtcctgctcttccatggcagcgacatgtggaagcagagcaagtcggccatgaacgccgtgaagatggacgtgcacgccaagctgatgcagaggtacaggcaggtgccacagtggtggttcctcatgctgctgctgggcagcgtggttgtgtcgctgctcatgtccttcgtctggaaggaggaggtgcagctgccgtggtgggggatgctcttcgccttcgcgctcgccttcgtcgtcacactccccatcggcgtcatccaggccaccaccaaccagcaaccggggtacgacatcatcgcgcagttcatgatcggctacgcgctgcccggcaagcccatcgccaacctgctcttcaagatttacggccggatcagcaccgtgcacgcgctgtcgttcctcgccgacctcaagctcggccactacatgaagatccccccacggtgcatgtacacggcccagctgatcgggacggtggtcgccggcgttgtgaacctggcggtggcgtggtggatgctggacaacatcgacaacatctgcgacgtggaggcgctgcacccggacagcccgtggacgtgccccaagtaccgcgtcacgttcgacgcgtcggtgatctggggcctgatcggccccgggcggctcttcggccggcacggtctctaccgcaacctggtgtggctgttcctggtcggcgcggtgctccccgtgccggtgtggctgctgagcagggcgttcccggagaagaagtggatcgcgctcatcaacgtgcccgtcatctcgtacggcttcgccgggatgccgccggccacgcccaccaacatcgccacatggctggtgacgggcaccatcttcaacttcttcgtcttcaggtaccgcaaggcgtggtggcagaagtacaactacgtgctctcggcggcgctcgacgccggcaccgccttcatgggggtgctcatcttcttcgcgctccagaacgcgcaccacgacctcaagtggtggggcacggaggtggatcactgcccgctcgcctcctgccccactgcgccgggcatcgccgtcaagggatgcccggtcttctgaatgttccaagctaagcggcgtagtaagcagtgtgtgtaacagtgtaaggaaatgtttgctacgggagccatggattcagccgggcatcgtttaaccgatgcagtgctttaccactcgtgaatgtaacaaagtttttcaccgcaaagacaccattgcaggggtggattcagagggagaaaaacagaggcgagacagcctatggagcaacagcccagtgtctgtggttggaacaccagaattttgagtcatctggaaccgacggctcaggtttattgcaacctcttaacacttgcgatctggcgtgtgtaataaactgaaagtctgcacaggttgaagctcggcgtgccaagaagcattatgtggggaatggga

SEQ ID NO: 4512 - DNA, 2584 bp, Zea mays
tctgagcgtctgcttgtagtaggccggccgagtcggtggagggagggtgggtagatagtagatagctagctagcgggtagcggagagggtccagtcagtgggcgggaggagcgaggggaccgggacgacgatggcgtcgcggaagtcgccggtggcggcggaggagcgggcggggacgggggaggggaagggggagcggtgcgcggtggaggaggtggcgctggtggtgccggagacggacgacccgtcgctgcccgtgatgacattccgggcgtgggcgctggggctcggctcctgcgtcgtcctcatcttcctcaacaccttcttcacgtaccgcacccagccgctcaccatctcggggatcctggcgcagatcctcgtgctccccgcagggcgcttcctggccgccgtgctgcccgaccgcgaggtcaggatcctcggcggcaggctcggcagcttcaacctcaacccggggcccttcaacgtcaaggagcacgtcatcatcaccatcttcgccaactgcggcgtctcctacggcggcggcgacgcttactccatcggcgccatcaccgtcatgaaggcctactacaagcagacgctcagcttcgcatgcgccctcctcatcgtcctcaccacacagatactggggtacggctgggctgggttgctgaggaggtacctggtcgaccctgccgagatgtggtggccttctaaccttgcccaggtctcactcttcagggcgctgcacgagaaagaagaggagggcggcaagtcccgtggcccgtcgcggatgcgcttcttcctcatcgtcttcttcgcgagcttcgcgtactacgcgctgccggggtacctgctgccgatcctgaccttcttctcgtgggcgtgctgggcgtggccgcacagcatcacggcgcagcaggtcgggtccgggtaccacggcctcggcgtcggcgcattcacgctcgactgggcgggcatctcggcgtaccacggcagcccgctggtggcgccgtgggcgtccatcgccaacacggccgtgggattcgtcatgttcatctacgtcatcgtgccgctctgctactggcagttcaacacgttcgacgcccgcaggttccccatcttctccaaccagctcttcacggcgtcgggccagaagtacgacaccaccaaggtgctcaccaaggacttcgacctcaacgtcgccgcctacgacagctacgggaagctctacctcagcccgctcttcgccatctccatcggctccggcttcctgcggttcacggccaccattgtccacgtcctgctcttccatggcagcgacatgtggaagcagagcaagtcggccatgaacgcggtgaagctggacgtgcacgccaagctgatgcagaggtacaggcaggtgccgcagtggtggttcctcatgctgctgctgggcagcgtggtggtgtccctgctcatgtccttcgtctggaaggaggagatgcagctgccgtggtgggggatgctcttcgccttcgcgctcgccttcgtcgtcaccctccccatcggcgtcatccaggccaccactaaccagcaaccggggtacgacatcatcgcgcagttcatgatcggctacgcgctgcccggcaagcccatcgccaacctgctcttcaagatctacggccggatcagcaccgtgcacgcgctatcgttcctcgcagacctcaagctcggccactacatgaagatccccccacggtgcatgtacacggcccagctggtcgggacggtggtcgccggcgtggtgaacctggcggtggcgtggtggatgctggacaacatcgagaacatctgcgacgtggaggcgctgcacccggacagcccgtggacgtgccccaagtaccgcgtcacgttcgacgcgtcggtgatctggggcctgatcggcccggggcggctcttcggccagcacgggctgtaccgcaacctggtgtggctgttcctggtcggcgcggtgctccccgtgccggtgtggctgctgagcagggcgttcccggagaagaagtggatcgcactcatcaacgtgcccgtcatctcgtacgggttcgccgggatgccgccggccacgcccaccaacatcgccacctggctggtgacgggcaccatcttcaactacttcgtcttcaggtaccgcaaggggtggtggcagaagtacaactacgtgctatcggcggcgctcgacgccggcaccgccttcatgggtgtgctcatcttcttcgccctccagaacgcgcaccacgagctcaagtggtggggcacggaggtggatcactgcccactcgcctcctgccccaccgcgccgggcatcgccgtcaagggctgcccggtgttttgaatcttccgacgcgagcgtagtaagcagtgtgtgtaacagtgtaaggaaatgtttgctacgggagccatggattcaaccaagcatcgattaaccgatgcagtgctttgtcactcgtgaatgtaacgccatagcgccagtggtggattcagatttcagagggagaaaaaaacacaggcccagtgtcttttaaaaaaaaaaaaaaaaaaaaaaaaa

SEQ ID NO: 4513 - DNA, 2379 bp, Zea mays
gtggaggaggtggcgctggtggtgccggagacggacgacccgtcgatgcccgtgatgacattccgggcgtgggcgctggggctcggctcctgcgtcgtcctcatcttcctcaacaccttcttcacgtaccgcacccagccgctcaccatctcggggatcctggcgcagatcctcgtgctccccgcagggcgcttcctggccgccgtgctgcccgaccgcgaggtcaggatcctcggcggcaggctcggcagcttcaacctcaacccggggcccttcaacgtcaaggagcacgtcatcatcaccatcttcgccaactgcggcgtctcctacggcggcggcgacgcttactccatcggcgccatcaccgtcatgaaggcctactacaagcagacgctcagcttcgcatgcgccctcctcatcgtcctcaccacacagatactggggtacggctgggctgggttgctgaggaggtacctggtcgaccctgccgagatgtggtggccttctaaccttgcccaggtctcactcttcagggcgctgcacgagaaagaagaggagggcggcaagtcccgtggcccgtcgcggatgcgcttcttcctcatcgtcttcttcgcgagcttcgcgtactacgcgctgccggggtacctgctgccgatcctgaccttcttctcgtgggcgtgctgggcgtggccgcacagcatcacggcgcagcaggtcgggtccgggtaccacggcctcggcgtcggcgcattcacgctcgactgggcgggcatctcggcgtaccacggcagcccgctggtggcgccgtgggcgtccatcgccaacacggccgtgggattcgtcatgttcatctacgtcatcgtgccgctctgctactggcagttcaacacgttcgacgcccgcaggttccccatcttctccaaccagctcttcacggcgtcgggccagaagtacgacaccaccaaggtgctcaccaaggacttcgacctcaacgtcgccgcctacgacagctacgggaagctctacctcagcccgctcttcgccatctccatcggctccggcttcctgcggttcacggccaccattgtccacgtcctgctcttccatggcagcgacatgtggaagcagagcaagtcggccatgaacgcggtgaagccggacgtgcacgccaagctgatgcagaggtacaggcaggtgccgcagtggtggttcctcatgctgctgctgggcagcgtggtggtgtccctgctcatgtccttcgtctggaaggaggagatgcagctgccgtggtgggggatgctcttcgccttcgcgctcgccttcgtcgtcaccctccccatcggcgtcatccaggccaccactaaccagcaaccggggtacgacatcatcgcgcagttcatgatcggctacgcgctgcccggcaagcccatcgccaacctgctcttcaagatctacggccggatcagcaccgtgcacgcgctatcgttcctcgcagacctcaagctcggccactacatgaagatccccccacggtgcatgtacacggcccagctggtcgggacggtggtcgccggcgtggtgaacctggcggtggcgtggtggatgctggacaacatcgagaacatctgcgacgtggaggcgctgcacccggacagcccgtggacgtgccccaagtaccgcgtcacgttcgacgcgtcggtgatctggggcctgatcggcccggggcggctcttcggccagcacgggctgtaccgcaacctggtgtggctgttcctggtcggcgcggtgctccccgtgccggtgtggctgctgagcagggcgttcccggagaagaagtggatcgcactcatcaacgtgcccgtcatctcgtacgggttcgccgggatgccgccggccacgcccaccaacatcgccacctggctggtgacgggcaccatcttcaactacttcgtcttcaggtaccgcaaggggtggtggcagaagtacaactacgtgctatcggcggcgctcgacgccggcaccgccttcatgggtgtgctcatcttcttcgccctccagaacgcgcaccacgagctcaagtggtggggcacggaggtggatcactgcccactcgcctcctgcccccccgcgccgggcatcgccgtcaagggctgcccggtgttttgaatcttccgacgcgagcgtagtaagcagtgtgtgtaacagtgtaaggaaatgtttgctacgggagccatggattcaaccaagcatcgattaaccgatgcagtgctttgtcactcgtgaatgtaacgccatagcgccagtggtggattcagatttcagagggagaaaaaaacacaggcccagtgtcttttaaaaaaaaaaaaaaaaaaaaaaaaa

SEQ ID NO: 4514 - DNA, 2504 bp, Hordeum vulgare subsp. vulgare
ggggtgcagccacggccagcgaagcagagcgtgcgtgcgtgcatagcgtacgtgagagagatgtcgtcgacgacgaagccgccggcggcgggagggaagggtgcgcagggggagggggagaggtacccggtggaggaggtggcgctggtggtgccggagacggacgacccggcgacgccggtgatgacattccgggcgtggacgctggggctcacctcctgcgtggtgctcatcttcctcaacaccttcttcacgtaccgcacgcagccgctcaccatctcgggcatcctggcccagatcctcgtgctccccgtcggccgcttcatggcgtccgtgctgcccgaccgcgaggtccggctgctcggcggccgcctcgggagcttcaacctcaacccgggccccttcaacatcaaggagcacgtcatcatcaccatcttcgccaactgcggcgtctcctacggcggcggcgacgcctactccatcggcgccatcaccgtcatgaaggcctactacaagcagtcgctcagcttcctctgcgccctcctcatcgtcctctccacgcagattctgggctatggctgggctggcatgctgaggaggttcctcgttgaccctgccgagatgtggtggccttccaacctcgcccaggtctccctcttcagggcgctgcacgagacgaaggagggcgggaagccgtccaagggcccgtcgaggatgcgcttcttcctcatcttcttcttcgcgagcttcgcctactacgcgctcccgggctacctgctgccgatcctgaccttcttctcgtgggcgtgctgggtgtggccgcgcagcatcacggcgcagcaggtcgggtccggctaccacgggctcggcgtcggcgccttcacgctggactgggcgggcatctcggcgtaccacggcagcccgctggtggcgccgtgggcgtccatcgccaacacggccgtcggcttcgtcatgttcatctacgtcatcgtgccgctctgctactggcggttcaacaccttcgacgcccgccggttccccatcttctccaaccagctcttcacctccacgggccagaagtacgacaccaccaaggtgctcaccagcgacttcgacctcaacgtcgccgcctatgacagctacggcaagctctacctcagcccgctcttcgccatctccatcggctccgggttcctccgcttctccgccaccatcgtgcacgtgctgctcttccacggcgccgacatgtggcggcagagccggagggccatcggcgccgcggccaagctcgacgtgcacgccaggctcatgcagaggtacaagcaggtgccgcagtggtggttcctggtgctgctggccgggagcatcgccgtgtcgctgctcatgtgcttcgtgtggaaggagcaggtgcagctgccatggtgggggatgctcttcgccttcgcgctcgccttcgtggtcaccctccccatcggcgtcatccaggccaccaccaaccagcaacccgggtacgacatcatcgcgcagttcatgatcggctacgcgctgcccggcaagcccatcgccaacctgctcttcaagatctacggccggatcagcaccgtgcacgcgctgtccttcctcgccgacctcaagctcggacactacatgaagatcccgccacgctgcatgtacaccgcccagctggtgggcacggtggtcgccggcgtggtgaacctggcggtggcatggtggatgctggatagcatcgagaacatctgcgacgtggaggcgctgcacccggacagcccctggacgtgccccaagtaccgggtcaccttcgacgcgtcggtgatctggggcctcatcgggccggggaggctcttcggccagcacgggctgtaccggaacctggtgtggctgtttgtggtcggcgccgtgctgccggtgccggtgtggctgctgagccgggcgttcccggagaagaaatggatcgcgctcgtcaacgtgcccgtcatctcctacggcttcgccgggatgccgccggccacgcccaccaacatcgccagctggctcgtcactggcaccgtcttcaacttcttcgtcttcaggtaccgcaaggggtggtggcagaagtacaactacgtgctgtcggcggcgctcgatgccggcaccgccttcatgggggtgctcatcttcttcgcgctccagaacgcgcaccacgacctcaagtggtggggcaccgaggtcgaccactgcccgctcgccacctgccccactgcgcccggcatcgtcgtcaagggctgcccggtcttctgagcactgagctcgccggagcatcggacagtgcccaccatgtatgtggctggcagtgatcatcgtctggattggtagaggaagccatgaattcggcctctcttgtgtccattaagcgacgcagccgctcgtcctgaatcccattgtaaacattgtgtgtgtgtgtgtgtgtgtgttttctccaaggaaatcaaatgcctggtctatat

SEQ ID NO: 4515 - DNA, 2699 bp, Oryza sativa Japonica Group
atccaaatcgaatccccgaaagcgttactaccttcctctccagatactggcaaattattttctttacaaatcattcgcagctagcttagctcgctttgcttgtagtggcgacttgtgaggcggaggaggaaggagatcgaggctagggagatggcgtcgttgaagtcgccggtggcggcggaggagcaggcggcgacggcggcggcggcggcggcgaagggggaaggggagaggtgcccggtggaggaggtggcgctggtggtgccggagaccgacgacccgacgacgccggtgatgacattccgggcgtggacgctggggctcgcgtcctgcgtcgtgctcatcttcctcaacaccttcttcacctaccgcacgcagccgctcaccatctcggggatcctggcccagatcctggtgctccccgcggggcagttcatggccgccgtgctgcccagccgcgaggtgcgcctcctcggcggccgcctcggcagcttcaacctcaacccggggcccttcaacatcaaggagcacgtcatcatcaccatcttcgccaactgcggcgtctcctatggcggcggcgacgcctactccatcggcgccatcaccgtcatgaaggcctactacaagcagtccctcagcttcctctgcgccctcctcatcgtcctcaccacacagatactgggctatggttgggccgggatgctgaggaggtacctggttgacccggctgacatgtggtggccatcgaatttagcccaggtctcactcttcagggcgttgcacgagaaggagggcggcgatggcgggaaggggtcgtcgtcgagggggcctacacggatgcgcttcttcctcatcttcttcttcgcgagcttcgcctactacgcgctgccgggctacctgctccccatcctgaccttcttctcgtgggcgtgctgggcgtggccgcacagcatcacggcgcagcaggtgggctccggctaccacggcctcggcgtcggcgccttcacactggactgggccggcatctcggcgtaccacgggagcccgctggtggcgccgtggtcgtccatcgccaacaccgccgcgggcttcgtcatgttcatctacctcatcgtgccgctctgctactggaagttcgacacgttcgacgcgaggaagttcccaatcttctccaaccagctgttcacggcgtccgggcagaagtacgacaccaccaaggtgctcacgagggagttcgacctcaacgtggcggcgtacgagagctacgggaagctgtacctgagcccgctgttcgccatctccatcgggtccgggttcctgaggttcacggcgacgatcgtgcacgtggcgctgttccacggcggggacatctggaggcagagcaggtcggcgatgagctccgcggcggcgaagatggacgtgcacgcgaagctgatgcggcggtacaagcaggtgccgcagtggtggttcctcgtgctgctcgtcggcagcgtcgccgtgtcgctggtcatgtcgttcgtgtacagggaggaggtgcagctgccgtggtgggggatgctcttcgccttcgccctcgccttcgtcgtcaccctccccatcggcgtcatccaggccaccaccaaccagcaaccggggtacgacatcatcgcgcagttcatgatcgggtacgcgctgccggggaagccgatcgcgaacctgctgttcaagatctacgggaggatcagcacggtgcacgcgctgtcgttcctcgcggacctcaagctggggcactacatgaagatcccgccgcggtgcatgtacacggcgcagctggtgggcacggtggtcgccggcgtggtgaacctggcggtggcgtggtggatgctgggcagcatcgacaacatctgcgacgtggaggcgctgcacccggacagcccgtggacgtgccccaagtaccgggtcacgttcgacgcgtcggtgatctgggggctcatcggccccgcccggctgttcggccgccacggcctgtaccgcaacctggtgtggctgttcctcgccggcgccgtgctgcccgtgccggtgtggctgctcagcagggcgttcccggagaagaagtggatcgcgctcatcaacgtccccgtcatctcctacgggttcgccgggatgccgccggcgacgccgaccaacatcgcgagctggctcgtcacgggcaccatcttcaactacttcgtgttcaagtaccgcaaggggtggtggcagaagtacaactacgtgctgtcggcggcgctcgacgccggcacggccttcatgggggtgctcatcttcttcgccctgcagaacgcccaccatgagctcaagtggtggggcacggcggtcgaccactgcccgctcgcctcctgccccaccgcgccggggatcgccgtcaagggatgcccggtgttctgagctcgccggccggagctgcacacggtggtgtatgtaggtagcaagaatttgggtttggattggggaaaaaccatgaattcagcctggtgtcagttaactgatacagtcctaatagttgtcagctgttacctcccgtgtgatgagtgtaacaaattggcttcctgcaaggaaatgatatagtagctagtagttcatataagatcatgccattctggaatatgctgaaacagagatgtgatggtagttaatcatcagagaatccgcaattacggagc

SEQ ID NO: 4516 - DNA, 3822 bp, Musa acuminata
catccaataaaagctccgtacctcaagagtcggcgccggaggtggcagcggcggcgggggaggaggagggggaggagaaggagtaccgcccggtggaggaggtggcgctggtggtgccggagaccgacgacccttcgctcccggtgatgacattccgggcctggttcatcggtctcgcctcctgcatcatcctcatcttcctcaacaccttcttcacctaccgcacgcagccgctcaccatctccgccatcctggcgcagatcacggcgctccctgtcggtcgcttcatggcgtcggtgctgcccaaccgggagatcagggtgttccggaactgggggttcaacctcaacccgggccccttcaacatcaaagagcatgttatcatcaccatcttcgccaactgcggggtgtccatcggcggcggagatgcctactccatcggcgccatcaccgtcatgaaggcgtactataagcagagcttgagcttcctctgcgggctcatcattgtgctcaccactcaggtaacggaaaaagaaatccacctttttctctctttagcccaacacttatcttgattccatggagacggattgggcagggtttaagtctaccatctctcccatcaatcgaatggcctggtacagagttgaagggaagatttttcctcgattagggggaataggaagcacttcaacttcaacaaaatagacctcatatttctgtatttaattcttagaaacatcaagaaaagaagaaattttgttctccaattataatagaagcctcttgaagtggctgatttttatgtttgcacataaagacatttttttcttagtaaagatttttcttttttgacttacatgtttccgagggcaaagacaaaactgtaacattaagctccggtaatctatctactaaatctaaaacatcaaaacaatgtgagcttgcttcgtgtgtcttgatgttgttgttttgatagtattttggaagtaatcaacacttgatcatttgatttatgaaagaaaccttgttgttcttctcctgatcactactttttttctttgtcctaaatctatattttcatggaagggatgtattactttacttgcagatacttggttatggatgggcagggatgctgaggagatacctcgtagatcctgctgaaatgtggtggccttctaacctcgcccaagtttcactcttcaggtctgatgtactatcttgtttaattaacccattgtaaggttttataggtaaacatccatagtctgattaatgctttgatcattacacaacttcatgggcttaaaaaactatataatggtttgcttaacaaatttatgattgtatgattttccatgaagcgtaaagaaattatgatggcagaaaagtacttttttttttggtctttggctattgcaatctattctataacttggtgtgaagtgtgaagtcttaatgcagaaggagaatgaatcacttgacttggaaaagttgacaagctttattttgtggggattctgacagagacaacatctttagactttctaaacactgaatgatagcaactgaaagaaactatgcattctgtttgcatcatcctctttgacatatgaacttgaatctgtgctagactgatacattgattactgtgaattagcgttccaaactgctttactgcaacctagaatctgaaaaagtccaaagaactgaaaacaacagcttctttgccaaatattttagatgcttctcgacttttacctcctgtcaaatatgtgatgcagagcacttcatgagaaggattcgaggtcgaaagggctaaccaggatgcagttcttcgtgctgttcttcgttgcaagctttgcatactacacactgcctggctatctcttgcccatactgaccttcttctcgtggatctgctggtcatggcctcgcagtataactgctcagcagattgggtcagcttaccacggccttggtgtcggtgccttcacgctggactgggcagggatctctgcgtatcatggcagtcctctggtcactccatggttctccattctgaacacagcagttggtttcatcatgttcatctacatcatagtaccgttgtgttactggaaattcaacacctttgatgcccggaagtttcccatcttctcgaatcagctcttcactaccagagggcagaagtatgatactaccaagatattgacgcccaactatgatctcaatgtagctgcgtatgagagctatggaaagctctacttgagtccactttttgcgctctccatcggatcaggttttgcaagattttcagccaccatcgtccatgttctcctgttccatggcaggtagagcagatgctattcaagttcttttctcttttatgtttctcataggatattacatactgcattcacggtctcaaatctttgtaaggtgtcagattcttatccagctccgttcttgtgcttcgggcgaactctgaattaagattacgtgcaaggaagttgtgatttgtttaggtaatgcaagtgcttcttcttccttgcagcgacatttggaggcagagcaagtcggcaatgaactctgccaaggtggacatccatgctaagctaatgaagaagtacaaacaagttcctcactggtggttcctcattctactagcagcaagtgtcatcttgtcattgatgatgtcgtttgtttggaaagaggaggtgcagctgccttggtgggggatgatatttgccttcgggttagcttgcctcgtcactcttcctattggggtcattcaggcaaccacaaaccaggtaagcaagcttcatgaattccctcttcttctcccaaggattgaatgacacaaagaagaacgtggaatcaaatggaaggttaatgactgatcttgtcaccgttgactccttgcagcaacctggatacgatattatagcccaattcatcatcggttacgtacttccagggaagcctattgccaatctgctgttcaagatatatggcagaatcagcaccatccatgcactctccttccttgctgacctcaaactcggtcactacatgaagatcccacccaggtgcatgtacaccgctcaggtgacgcaatcattcattgattcattcatctgaacatttccatccctttctacttggccgatacctaaactttcaacaacatccatcttctttcagctcgttggaactgtggtttccggcgtcgtcaaccttgcagtggcgtggtggatgttgggaagcatcgagaacatctgtgacgttgatgcactgcaccctgagagcccatggacttgccccaagtaccgagttaccttcgacgcttctgtcatatggggcctcgtaggacctggccgcctcttcgggcatggaggactgtaccggaacctggtgtggctgttcctcgtcggagcagcgttacccgttcctgtgtgggcactgagcaaaatctttccggagaagaagtggattcctttgatcaacataccagtcatctcctacggcttcgccggaatgcctcctgcaaccccaaccaacatagcgagctggctcatcaccggaaccatcttcaattactttgttttcagatacagaaagggatggtggcagaagtacaactacgttctatctgccgcactggatgcagggacagcattcatgggtgtgctgctgttcttcgccctccagaatgcgaatcacaatctgcgatggtggggcacagagctcgatcactgtccgttggcatcatgccccaccgaacctgggatatcagtaaaaggatgtccggtgttt

SEQ ID NO: 4517 - DNA, 3536 bp, Oryza sativa Japonica Group
ggcgtcgttgaagtcgccggtggcggcggaggagcaggcggcgacggcggcggcggcggcggcgaagggggaaggggagaggtgcccggtggaggaggtggcgctggtggtgccggagaccgacgacccgacgacgccggtgatgacattccgggcgtggacgctggggctcgcgtcctgcgtcgtgctcatcttcctcaacaccttcttcacctaccgcacgcagccgctcaccatctcggggatcctggcccagatcctggtgctccccgcggggcagttcatggccgccgtgctgcccagccgcgaggtgcgcctcctcggcggccgcctcggcagcttcaacctcaacccggggcccttcaacatcaaggagcacgtcatcatcaccatcttcgccaactgcggcgtctcctatggcggcggcgacgcctactccatcggcgccatcaccgtcatgaaggcctactacaagcagtccctcagcttcctctgcgccctcctcatcgtcctcaccacacaggtctccctccacacctactccggttttacgctgggtttaatctttcggtttccacggttctttccgagggtgccgatatactgaaattttgatccgaaattgccgaagttttgaacaaaatttagtcaaatttaaataaaatattgccaaatttaaaaagataaaatttaaatttaaaaattcggtcgaaataacatcatattgggtccgaaatgacgttccggaattttgaaccatgattttacgtagcaccttaattgaatgcttaattagttaattaatcacaaagaaacaatcaacaaaaccacttcaaccatatctttttccctcagttcgattgcttgcttctgactggttctgactggtactaagaaataagaattgactcgtgtcttcttttttttggcgaatttgtcgcgcgattgcgacttgtatgttttcctccaaaagatgtgacaaatactgaaccaatcagacgttcttgcgttgctttatctcgcgtacgagttgccaccaatcatgcagcgttgaagttgaaattgaaagaaaacctcatgttggcatataacgtcaccgtgaatccatccatgtactaggaggccctacaaataattggcgtgattttgttcgtctagcatgcggctgcatgtgcctcttgcaaattttcgtattagtgggcaactttagcattcctgtcggattgctggcactaagatgcaaaaaagattgggtatatggtgacggatggtccgtgcacgagtcaaaactaagcagtactactactagtcataaataggagtatgagattattcttgcatcatgattagactagtcgtttaactaatccatcccaaagtaaaaaaagaaaacaatatagttaactaatcatgaacaggagttattctcacgcaatttaatctgagtgcgctatgaatctagaaaaactatatttattaattttttaataactatttagacgatatacaaacaatgagacatgaaaattcatatcgtggtagatagtataagtgtagtagcacagctaagtgacgtcatgcttggcttgctgcatgcagatactgggctatggttgggccgggatgctgaggaggtacctggttgacccggctgacatgtggtggccatcgaatttagcccaggtctcactcttcaggtaattaattaatcacgtcgtaaatctctcaattaagcaagatcagccagttaactatgcaggctaactaatgatctctgtgagtacatgaagggcgttgcacgagaaggagggcggcgatggcgggaaggggtcgtcgtcgagggggcctacacggatgcgcttcttcctcatcttcttcttcgcgagcttcgcctactacgcgctgccgggctacctgctccccatcctgaccttcttctcgtgggcgtgctgggcgtggccgcacagcatcacggcgcagcaggtgggctccggctaccacggcctcggcgtcggcgccttcacactggactgggccggcatctcggcgtaccacgggagcccgctggtggcgccgtggtcgtccatcgccaacaccgccgcgggcttcgtcatgttcatctacctcatcgtgccgctctgctactggaagttcgacacgttcgacgcgaggaagttcccaatcttctccaaccagctgttcacggcgtccgggcagaagtacgacaccaccaaggtgctcacgagggagttcgacctcaacgtggcggcgtacgagagctacgggaagctgtacctgagcccgctgttcgccatctccatcgggtccgggttcctgaggttcacggcgacgatcgtgcacgtggcgctgttccacggcggggacatctggaggcagagcaggtcggcgatgagctccgcggcggcgaagatggacgtgcacgcgaagctgatgcggcggtacaagcaggtgccgcagtggtggttcctcgtgctgctcgtcggcagcgtcgccgtgtcgctggtcatgtcgttcgtgtacagggaggaggtgcagctgccgtggtgggggatgctcttcgccttcgccctcgccttcgtcgtcaccctccccatcggcgtcatccaggccaccaccaaccaggcacgcatccatccatccatcgatctcaccatgaatcatcgtcgattcgtcgttgtccatctctgattgtgttagaaaaaaacttgttgtggttgcagcaaccggggtacgacatcatcgcgcagttcatgatcgggtacgcgctgccggggaagccgatcgcgaacctgctgttcaagatctacgggaggatcagcacggtgcacgcgctgtcgttcctcgcggacctcaagctggggcactacatgaagatcccgccgcggtgcatgtacacggcgcagctggtgggcacggtggtcgccggcgtggtgaacctggcggtggcgtggtggatgctgggcagcatcgacaacatctgcgacgtggaggcgctgcacccggacagcccgtggacgtgccccaagtaccgggtcacgttcgacgcgtcggtgatctgggggctcatcggccccgcccggctgttcggccgccacggcctgtaccgcaacctggtgtggctgttcctcgccggcgccgtgctgcccgtgccggtgtggctgctcagcagggcgttcccggagaagaagtggatcgcgctcatcaacgtccccgtcatctcctacgggttcgccgggatgccgccggcgacgccgaccaacatcgcgagctggctcgtcacgggcaccatcttcaactacttcgtgttcaagtaccgcaaggggtggtggcagaagtacaactacgtgctgtcggcggcgctcgacgccggcacggccttcatgggggtgctcatcttcttcgccctgcagaacgcccaccatgagctcaagtggtggggcacggcggtcgaccactgcccgctcgcctcctgccccaccgcgccggggatcgccgtcaagggatgcccggtgttc

SEQ ID NO: 4518 - DNA, 2391 bp, Arabidopsis thaliana
tgacttcagaagaagaaagaaaatggacgcggagaaggctactgataagactaatgtccatctctcctcggaccatgagcgttgtccggtggaggaagtggctcttgttgtgcctgagacggatgatccaagcctaccggtgatgacattcagaacttggttcttgggtctgacctcttgtgttctgctcatctttctcaacacgttcttcacataccgtacgcagccactcaccatctcagccatcctcatgcagatcgctgttttgcccatcggcaagttcatggctcggactcttcccaccacttctcacaaccttcttgggtggagttttagcctcaatcctggtccttttaacatcaaggagcatgtcattatcaccatctttgctaattgtggcgttgcttacggtggtggtgatgcttactctattggggctatcactgttatgaaagcttactataaacagagccttagcttcatctgtggtctcttcatcgtcttgaccactcagattttgggttatggttgggctgggattctgaggaggtaccttgttgatcctgttgacatgtggtggccttcaaatctcgctcaagtttctctcttcagagcgttgcacgagaaggaaaacaagtctaaaggcttgacgaggatgaagttctttctagtagctcttggtgctagctttatttactatgcacttccaggctatctattcccaatcttgactttcttctcatgggtttgttgggcttggccaaacagcatcacggctcagcaggttggttcagggtaccatggccttggggttggagccttcactcttgactgggctggcatctctgcttaccatggtagtccattggtggctccatggtcctctatcctcaacgttggtgttggtttcatcatgtttatatacatcatcgtccctgtttgttactggaagttcaacactttcgatgccagaaagttccccattttctccaaccagctattcactactagtggccagaagtatgacacaaccaagatcttgacaccgcagtttgatctggatattggtgcttataacaactacgggaaactttacctcagccctcttttcgcactctctatcggatccgggtttgcgagattcactgcaacactaactcatgtggcattgttcaacggcagggacatatggaagcagacttggtctgcagtgaacaccacgaagctggacatccatggaaaattgatgcaaagctacaaaaaagtgcctgagtggtggttttatatattgctggcaggaagtgtagccatgtctctcctaatgtcttttgtgtggaaggagtcagtgcagcttccatggtggggaatgctctttgcttttgcattggccttcattgtcacactccctatcggtgtcattcaagcaactacaaatcagcaaccaggatatgatataatagggcagttcattatcggttatatcctgcctggaaaacccattgcaaacctgattttcaagatttacgggagaatcagcacagtccatgctctctcatttttggcagaccttaagcttggccattacatgaaaatcccaccgcgctgcatgtacacggctcagctggtgggcactgtggtagctggtgtggtgaatctgggagtggcctggtggatgttggagagcattcaagacatatgcgacatcgaaggagaccaccctaatagcccctggacttgccccaagtatagagtgacgttcgatgcttcagttatttgggggttgataggaccaagacggctctttggaccaggaggcatgtaccgtaaccttgtctggctcttcctcattggagctgtcctgcctgttcccgtgtgggcgctgagcaagatcttcccaaacaagaagtggatccctctcatcaacattccagttatctcctacggctttgcagggatgcctccagccactccaaccaacattgccagctggttggtcacaggaaccatcttcaactactttgtgttcaattaccacaagagatggtggcagaagtacaattacgtactctctgcagcgctcgatgcagggaccgcgttcatgggggtgctcttgttcttcgccctgcagaatgctggacacgacctcaaatggtggggcactgaagtagaccactgccctcttgcctcctgtcccacggctcctggaatcaaagccaaaggctgtcccgttttctaagctcagcagaattgattagattcaaacataaaaattcacatgttttgccctttctattgcttctttctgtacagccttctactgttagatggtggccatcagaatgcaataaactctaccttagattcatttgagaatgataatgagctattgag

SEQ ID NO: 4519 - DNA, 2214 bp, Arabidopsis lyrata subsp. lyrata
atggacgccgagaaggctagtgatagaaacaatgtccatctttcttcggaccacgagcgttgtccggtggaggaagttgctcttgtggtgcctgagacggacgatccaagcataccggtgatgacattcagagcttggttcttgggtctgacctcttgtgttctgctcatctttctcaacactttcttcacctaccgcacgcagccacttaccatctcagccatcctcatgcagatcgctgttttgcccatcggcaagttcatggctcgtactcttcccaccacttctcacaaccttcttgggtggaattttagcctcaatcctggtccttttaatatcaaggagcatgtcattatcaccatctttgctaattgtggcgtttcttacggtggtggtgatgcttactctattggggctatcactgttatgaaagcttactataaacagagccttagcttcatctgtggtctcttcatcgtcttgaccactcagattttgggttatggttgggctggaattttgaggaggtaccttgttgatcctgttgacatgtggtggccttccaatcttgctcaagtttctctattcagagcgttgcacgagaaggaaaacaagtctaaaggcttaacgaggatgcagttctttctagtggctcttggtgctagctttctttactatgcacttccaggctatctattcccaatcttgaccttcttctcatgggtttgctgggcttggccaaacagcatcacggctcagcaagttggctcagggtaccatggccttggggttggagccttcactcttgactgggctggtatctctgcttaccatggtagtcccttggtggctccatggtcctctatcctcaacgttggtgttggtttcatcatgtttatatacatcgtcgtccctgtttgttattggaagttcaacactttcgacgccagaaagttccccattttctccaatcagctcttcactaccagtggccagaagtatgacacaaccaagatcttgacaccgcagtttgatctggatattggtgcttataacagctacgggaagctctacctcagccctcttttcgcactctctatcggatccgggtttgcgagattcactgcaacactaacccatgtggcattattcaacggcagggacatatggaggcagacttggtctgcagtgaatactacgaagctggacatccatgggaaattgatgcaaagctacaaaaaagtgcctgagtggtggttttatgtgttgctggcaggaagcgtagccatgtctcttctcatgtcttttgtgtggaaagagtcagtgcagcttccatggtggggaatgctctttgcttttgcattggcctttattgtcacactccctatcggtgtcattcaagcaactacaaatcagcaaccggggtatgatataatagggcagttcattatcggttatattctgcctggaaaacccattgcaaacctgattttcaagatttacgggcggatcagcacagtccacgctctctcattcttggcagaccttaagcttggccattacatgaaaatcccaccgcgctgcatgtacacggctcagctggtggggactgtggtagctggtgtagtgaatctgggagtggcctggtggatgctggagagcattcaagacatatgcgacattgaaggagaccaccctaatagcccgtggacttgccccaagtacagagtgacgttcgatgcttcagttatttggggtttgataggaccaagacggctgtttggaccaggaggcatgtaccgtaaccttgtctggctcttcctcatcggagctgtcctgcctgttcccgtgtgggcgctgagcaaaatcttcccaaacaagaagtggatacctctcataaacattccagttatctcctacggctttgcagggatgcctccagccactccaaccaacattgccagctggctggtcacaggaaccatcttcaactactttgtgttcaattaccacaagagatggtggcagaagtataactacgtactctctgcagcgctcgatgcaggaaccgcattcatgggggtgctcttgttctttgccctgcagaacgctggacacgacctcaaatggtggggcactgaagtagaccactgccctcttgcctcctgtcccacggcccctggaatcaaagccaaaggctgtcccgttttctaa

SEQ ID NO: 4520 - DNA, 1375 bp, Zea mays
tatccatcacggcgaagagacctcgggagtgagtgggccgctgggagagcagacaacactgcaacggggtgcgcgcccgcccgtgccgttctccgtcgtcaccgttcgcccgctgccgatccatggggtgggcgctggctctgcacggcggcgccggggacgtgccgcgcacgctgccgcccgagagcagggagccgcgcctcgccacactccgccgctgcctcgacatcggcaccgccgcgctccgggagggccgcaccgcgctcgacgttgtcgagctcgtcgtgagggagctggaggactgcccgcacttcaacgccggccggggctccgtgctcacctccgccggcaccgtcgagatggaggcctgcgtcatggagggagccaccctgcactgcggcgcggtctccggactctccaccgtcgccaacgccgtctccctcgccagactcgtcatggagaagacgccgcacatctacctcgccttcgatggcgccgaggccttcgccagggaacagggggtggagactaaggatccaagccactttatcacggacaacaatatcgagcgtctgaggcaggccaaagaggccaacagggtgcagatcgactacacccagccagcagcaggccaaagccaaaaggcccaggccgtggtggacgacaactgccagacgggcacggtagggtgcgtggccgtggacgcggcgggcaacctcgcgacggcgacgtccacgggcgggctggtgaacaagatgcccggcaggatcggcgacacgcctctggtgggcgccggaacgtacgccaacgcgctgtgcgcggtgtccgccacgggcaagggcgaggagatcatccgccgcacggtggcgcgcgacgtcgcggcgctgatggagcgcggggacgcgctcccgctgcgcgacgccgcggcgcgcgtcgtggcgggggcggcccgcggcgccgtggggctggtggccgtgtcgcgccagggggaggtctgtatggcgcacaacaccaccgccatgttcagggcgtgcgccaccgaggccggccacaccgaagtcggcatctggacggacgccgccgacgcaggcacgggcgcggacggagagactgtcagcgtcgcgctctagctctaggcatttcatccccgtgtggcgtattctatcgttcgcgtcccattattgccacctgtccgatagacaacttgttctcgatccggtaatttcaccgtgcttcagctgcgtgtgtttggaaaaattgattcggtttcgggtattgttaagagatcgatgggagaagtgaaacattgttgggcgttcagtatgcttttgtaataccttttgttttcttaaataaagtcctaaggagtgttggg

SEQ ID NO: 4521 - DNA, 1854 bp, Zea mays
cccagcaccgtaaccaccggacagagcacgcaccatgaaacccaccaccagcagcacgctgctgctggcagcggcggtgctctgcctcgcgctgccgctgctccccggcgccacggccaaggcggcgcgggcgcggcagggcgactacctggcgcgcctgcgcgggtcgtcgccgtggccggccgagtcggcgtcgctggcggtcgcggcgacggacagagcgtcccggcacgcggcgtcgccgggcgtggggcgcaaagaggacgaccgcgtggacaggctgcccggccagccgtcgggcgtggacttcgagcagtacgccgggtacgtgacggtggacgccgcggccgggcgcgcgctcttctactacctcgccgaggccgtgggcggcgggtcggcgtcggcggccaagccactcctgctctggctcaacggaggccccgggtgctcgtcgctggggtacggcgccatggaggagctgggcccgttccgggtgaagagcgacggcaagacgctgtaccgcaacccgtacgcgtggaacaacgcggcaaacgtgctgttcctggagagccccgccggcgtgggcttctcttactccaacacgacggctgactacagccggagcggcgacaacaagacggccgaggacgcgctccggttcctgctcaactggatggagaagttccccgagtacaagggccgcgacctgtacctggccggagagagctacgccggccactacgtcccgcagctcgcccacgccatcctcgggcacgccgccgccggcaagccgtcgtcgtcgtcgcccctcaacctcaggggcatcatgatcgggaacgcggtgatcaacgactggacggacaccaagggcatgtacgacttcttctggacgcacgcgctcatctccgacgcgacggccgacgcgatcggcaggcactgcaacttcagcgccgccgccgacgccgacgccgcggcctccaacgacaagtgcaacgaagcgacgtcggaggccgacgaggccctgcaggacatcgacatctacaacatctacgcgcccaactgccagtcccccggcctcgtctcgccgcccatcaccccctcgatggacaggtttgacccgtgctcggattattacgtgaacgcgtacctcaacgacccggacgtgcagagggcgctccacgccaacgtcacccgcctcgaccacccctggtccgcctgcagcgatgtcttgagacgctggactgacagcgccacgaccgtcctgcctattctcacggagctcctcaacaacgacatcagggtctgggtgtacagtggagacaccgatgggagagtgccggtcacttccagcaggtactccgtgaaccagctccagctcccagttgccgcaaaatggagggcatggttcagcagcactcagggcgccggagaggtgggcggctacaccgtgcagtacaagggcaaggagaagggcagcctcagcctggtcaccgtcagaggagccggccacgaggtgcccagctaccagccaaggcgagcgctcgtgcttgtccagggtttccttgcaggcaaaacgcttcctggctgcaaaacgtgcgagtcggcttagcggttggcagcactacagcaacatgtatctgagagcgagggagagaaagcgaaagggaatcaagccattggaaacacacgcaccttgcggatcatgtaactgcaggtctgcaaaaaaaaaaggcaattatacagtcatagtcacaggcagagaaatctgtacacgaaataagtaagtaggttatgttccatggtgtatttagtgtgctaatttgatgccataaatctcagtcgtgcaggtgcatc

SEQ ID NO: 4522 - DNA, 1996 bp, Zea mays
aaccggacagagcacgcaccatgaaacccaccaccagcagcacgctgctgctggcagcggcggtgctctgcctcgcgctgccgctgctccccggcgccacggccaaggcggcgcgggcgcggcagggcgactacctggcgcgcctgcgcgggtcgtcgccgtggccggccgagtcggcgtcgctggcggtcgcggcgacggacagagcgtcccggcacgcggcgtcgccgggcgtggggcgcaaggaggacgaccgcgtggacaggctgcccggccagccgtcgggcgtggacttcgagcagtacgccgggtacgtgacggtggacgccgcggccgggcgcgcgctcttctactacctcgccgaggccgtgggcggcgggtcggcgtcggcggccaagccactcctgctctggctcaacggaggccccgggtgctcgtcgctggggtacggcgccatggaggagctgggcccgttccgggtgaagagcgacggcaagacgctgtaccgcaacccgtacgcgtggaacaacgcggcgaacgtgctgttcctggagagccccgccggcgtgggcttctcctactccaacacgacggaggactacagccggagcggcgacaacaagacggccgaggacgcgctccggttcctgctcaactggatggagaagttccccgagtacaagggccgcgacctgtacctggccggagagagctacgccggccactacgtcccgcagcttgcccacgccatcctcgggcacgccgccgccggcaagccgtcgtcgtcgtcgcccctcaacctcaggggcatcatgatcgggaacgcggtgatcaacgactggacggacaccaagggcatgtacgacttcttctggacgcacgcgctcatctccgacgcgacggccgacgcgatcggcaggcactgcaacttcagcgccgccgccgacgccgacgccgcggcctccaacgacaagtgcaacgaggcgacgtcggaggccgacgaggccctgcaggacatcgacatctacaacatctacgcgcccaactgccagtcccccggcctcgtctcgccgcccatcaccccctcgatggacaggtttgacccgtgctcggattattacgtgaacgcgtacctcaacgacccggacgtgcagagggcgctccacgccaacgtcacccgcctcgaccacccctggtccgcctgcagcgatgtcttgagacgctggactgacagcgccacgaccgtcctgcctattctcacggagctcctcaacaacgacatcagggtctgggtgtacagtggagacaccgatgggagagtgccggtcacttccagcaggtactccgtgaaccagctccagctcccagttgccgcaaaatggagggcatggttcagcagcactcagggcgccggagaggtgggcggctacgtcgtgcagtacaagggcaaggagaagggcagcctcagcctggtcaccgtcagaggagccggccacgaggtgcccagctaccagccaaggcgagcgctcgtgcttgtccagggtttccttgcaggcaaaacgcttcctggctgcaaaacgtgcgagtcggcttagcggttggcagcactacagcaacatgtatctgagagcgagggagagaaagcgaaagggaatcaagccattggaaacacacgcaccttgcggatcatgtaactgcaggtctgcaaaaaaaaaaaaggcaattatacagtcatagtcacaggcagagaaatctgtacacgaaataagtaagtaggttatgttccatggtgtatttagtgtgctaatttgatgccataaatctcagtcgtgcaggtgcatcagtgctagcgaatcattagaaacaaagaattttcacttccccgccaattcctttctttcttcgaacaataacggggcgtttggatcccttcattttaaaggaattggaattcactcaaaaaaaaaaaaaaaaaaaaaaaaaaaaaaaaaaaaaa

SEQ ID NO: 4523 - DNA, 1845 bp, Sorghum bicolor
atgaggaccaccaccaccaccaacactgcgctgccgctcttggcaatgctctgcctcgcgctgccgctgctccccggcgccacggccaaggcggcacgggcgcggcagggcgactacctggcgcgcctgcgcgggtcgccgcgccagtcgccgtggccggccgagtcggcgtcgctggcggtcgcgtcggcgacggacagagccgcccggcacgcggcgtccccgcccgtggggcgcaaggaggacgaccgcgttgacaagctgcccggccagccgtccggcgtggacttcgagcagtactccgggtacgtgacggtggacgccgcggccgggcgcgcgctcttctactacctcgccgaggccgtcggcggcgggtcggcggccaagccactcctcctctggctcaacggaggccccgggtgctcatcgctggggtacggcgccatggaggagctgggcccgttcagggtgaagagcgacggcaagacgctgtaccgcaacccgtacgcgtggaacaacgcggcgaacgtgctgttcctggagagccccgccggcgtgggcttctcctactccaacacgacggcggactacggccggttcggcgacaacaagacggcggaggacgcgctgcagttcctgctcaactggatggacaagttccccgagtacaagggccgagacttctacctcgccggggagagctacgccggccactacgtcccgcagctcgcccacgccatcctccgccacgccgccgccaccgccggcggcggcaagccgtcgtcgtcgtcgcccatcaacctcaagggcatcatgatcgggaacgcggtgatcaacgactggacggacagcaagggcatgtacgacttcttctggacgcacgcgctcatctccgacacgacggcggacgccatcggcaggtactgcaacttcagcgccgccgccgcgggctccgacaagtgcgacgaggcgacgtcggaggccgacgaggccctggaggacatcgacatctacaacatctacgcgcccaactgccagtccgacgacctcgtctcgccgccgatcacaccctcgatggacaactttgatccgtgctcggattattacgtgaacgcgtacctcaacgacccggctgtgcagagtgcgctccacgccaacgtcacccgcctcgaccacccctggtccgcctgcagtgatgtcttgagacgctggactgacagcgccacgaccgtgctgccaattctcacggagctcctcaagaacgacgtcagggtctgggtgtacagtggagacaccgatgggagagtgccggtcacttccagcaggtactccgtgaaccagctccagctcccagtcgctgcaaaatggagggcatggttcagcagcactcagggcgccggagaggtgggtggctacgttgtgcagtacaagggcaaggagaagggcagcctgagcctggtcaccgtgagaggagccggccacgaggtgcccagctaccagccaaagcgagcgctcgtgcttgtccagaatttccttgcaggcaaaacgctccctgactgcaaaacatgcgagtcggcttagcattcccaaaagtacagagactgcaccggcagcattacaaaaacatgtatccatttgatccagtacgagagagagaaagcgaaagcagatcaagttattagaaatagaaacattaaacatacgcacctgcttgcagatcatgtaactgcaggtctgcagaaggcaattatatagtcatatactcctagagagaaatctgtacacgaatgaagatggaatcaaacaaatcttttttagagtgatgaaatgaatcaacatcactag

SEQ ID NO: 4524 - DNA, 1833 bp, Zea mays
gcaccgtaaccaccgacagagcacgcaccatgacgaggaccaccaccagcagcacgctgctgacagcggcgctgctctgcctcgcgctgccgctgctccccggggccacggccaataaggcggcgcggcggcggcagggcgacaacctggcgcgcctgcgcgggtcgccgtggccggccgagtcgtcggtgtcgctggcggtcgcggcgacggatgacagagcgtcccggcacgcggcgtcgccgcccgcggggcgcagcaaggaggacgaccgcgtggacaagctgcccgggcagccgtcgggcgtggacttcgagcagtacgccgggtacgtgacggtggacgccgcggccgggcgcgcgctcttctactacctgaccgaggccgtcggcggcggggcggcggccaagccactcctcctctggctcaacggaggccccgggtgctcgtcgctggggtacggcgccatggaggagctgggccctttccgggtgaagagcgacggcaagacgctgtaccgcaacccgtacgcgtggaacaacgcggcgaacgtgctgttcctggagagccccgccggcgtgggcttctcctactccaacaggacggaggactacagccggagcggcgacaacaagacggccgaggacgcgctcctgttcctgctcaactggatggagaagttccccgagtacaagggccgcgacttgtacctcgccggcgagagctacgccggccactacgtcccgcagctggcccacgccatcctccgccacgccgccgccgccgccggcaagccgtcgtcgcccatcaacctcagaggcatcatgatcgggaacgcggtgatcaacgactggacggacaccaagggcatgtacgacttcttctggacgcacgcgctcatctccgacgcgacggccgacgccatcggcaggcactgcaacttcagcgccgccgccgccgccgccgcgggctccaacgacaagtgcgacgaggcgacgtcggaggccgacgaggccctggaggacatcgacatctacaacatctacgcgcccaactgccagtccgccgacctcgtctcgccgcccatcaccccctcgatggacaactttgacccgtgctcggattattacgtggacgcctacctcaacgacccggacgtgcagcgggcgctccacgccaacgtcacccgcctcgaccacccctggtccgcctgcagcgatgtcttgagacgctggactgacagcgccgcgaccgtcctgccgattctcgcggagctcctcaagaacgacctcagggtgtgggtgtacagtggagacaccgacgggagagtgccggtgacttccagcaggtactccgtcaaccagctccagctccccgtggctgcaaaatggagggcatggttcagcagcactcagggggccggggaggtgggtggctacgtggtgcagtacaagggcaaggagaagggcagcctcagcctggtcaccgtgaggggagctgggcacgaggtgcccagctaccagccaaagcgagcgctcgtgcttgtccagggcttcctcgcgggcaaggcgctccccgactgcgaaacatgcgagtcgggttaagcgtagctagcgtttggaagcagcacgcagcacgcagcacacaagagaagagagcgctgtgcaacagcatgtacccccatgcatccatttgatccagtacgacagacaaagtctgagatagaaacatacgcacgcacccaccgtaccttgcagaaaaccatgcaaaaatgcagtcatacacagagcaatctgtacacgaatgaagatggaatcaaacggatctttaagc

SEQ ID NO: 4525 - DNA, 1868 bp, Zea mays
agtgctcgtgctcgtcctctcccagcaccgtaaccaccgacagagcacgcaccatgacgaggaccaccaccagcagcacgctgctgacagcggcgctgctctgcctcgcgctgccgctgctccccggggccacggccaataaggcggcgcggcggcggcagggcgacaacctggcgcgcctgcgcgggtcgccgtggccggccgagtcgtcggtgtcgctggcggtcgcggcgacggatgacagagcgtcccggcacgcggcgtcgccgcccgcggggcgcagcaaggaggacgaccgcgtggacaagctgcccgggcagccgtcgggcgtggacttcgagcagtacgccgggtacgtgacggtggacgccgcggccgggcgcgcgctcttctactacctgaccgaggccgtcggcggcggggcggcggccaagccactcctcctctggctcaacggaggccccgggtgctcgtcgctggggtacggcgccatggaggagctgggccctttccgggtgaagagcgacggcaagacgctgtaccgcaacccgtacgcgtggaacaacgcggcgaacgtgctgttcctggagagccccgccggcgtgggcttctcctactccaacaggacggaggactacagccggagcggcgacaacaagacggccgaggacgcgctcctgttcctgctcaactggatggagaagttccccgagtacaagggccgcgacttgtacctcgccggcgagagctacgccggccactacgtcccgcagctggcccacgccatcctccgccacgccgccgccgccgccagcaagccgtcgtcgtcgcccatcaacctcagaggcatcatgatcgggaacgcggtgatcaacgactggacggacaccaagggcatgtacgacttcttctggacgcacgcgctcatctccgacgcgacggccgacgccatcggcaggcactgcaacttcagcgccgccgccgccgccgccgccgcgggctccaacgacaagtgcgacgaggcgacgtcggaggccgacgaggccctggaggacatcgacatctacaacatctacgcgcccaactgccagtccgccgacctcgtctcgccgcccatcaccccgtcgatggacaactttgatccgtgctcggattattacgtggaagcctacctcaacggcccggacgtgcagcgggcgctccacgccaacgtcacccgcctcgaccacccctggtccgcctgcagcgatgtcttgagacgctggactgacagcgccgcgaccgtcctgccgattctcgcggagctcctcaagaacgacctcagggtgtgggtgtacagcggagacaccgacgggagagtgccggtgacttccagcaggtactccgtcaaccagctccagctccccgtggctgcaaaatggagggcatggttcagcagcactcagggggccggggaggtgggtggctacgtggtgcagtacaagggcaaggagaagggcagcctcagcctggtcaccgtgaggggagccggccacgaggtgcccagctaccagccgaagcgagcgctcgtgcttgtccagggcttcctcgcgggcaaggcgctccccgactgcgaaacatgcgagtcgggttaagcgtagctagcgtttggaagcagcacgcagcacacaagagaagagagcgctgcaacagcatgtaccccctatccatttgatccagtacgacagacatagtcagagatagaaacatacgcacgcactcaccgtaccttgcagataatcatgcaaaaatgcagtcatacacagagcaatctgtacacgaatgaagatggaatcacacggatctttaaacaaaaaaaaaaaaaaaaa

SEQ ID NO: 4526 - DNA, 4569 bp, Oryza sativa Japonica Group
atgaggacgagcacgagcaacgccgcgctgctcttgctggtggcagcagcgcaatgcctcgcgctgctctccgtcgccgccgcggcgaagccgcgcacgcgccagggcgactacctcgaccggctccgcggctcgccgtcgtcgtgggcgtcgctggccgaggatcgtggcgcgccggcgccgtcgccatcgccgtccggtgggcggcacgcggcgccagcggcggcggcggttgggagcaaggaggcggaccgcgtggcggggctgccggggcagccggccggcgtgggcttcgcgcagtacgccgggtacgtgacggtggacgcggcggcggggcgcgcgctgttctactacctcgccgaggccgacggcggcgccgccgcgtcgtccaaggcgcccctcctcctctggctcaacggcggccccggctgctcgtcgctcgggtacggcgccatggaggagctcggcccgttccgcgtcaagagcgacggcgtgtcgctctaccgcaatccctactcctggaacaacggtaagcaccgcctcgccgccgcggcgcgcacgacgtcgccatgtcaactcagaattcagagcaactactaacaccacagcatcattcgatccatggcgtggcgcgcagtggcgaacgtgatgttcctggagagcccgatcggcgtggggttctcgtactcgaacacgacggcggactacagccggatgggggacaacagcacggcggaggacgcgtacaagttcctcgtcaactggatggagcgcttcccggagtacaagggccgcgacttctacctcgccggcgagagctacgccggccactacgtcccccagctcgcccacgccatcctccgccactcctccgccgccgccggcggcaagccctcctcctcgccgatcaacctcaaaggcatcatggtacacacatatactactacactacatatagtacaacgaattcggatctaatcttatccggttttgttatactatgaaatatctcattccattgtagattagggtgtgtttaattagttctacgttaaaatggaaagttgactaaagttaaaagtttgaataaaaaagttagaagtttatatatgtagaaaagttttgatgtgatggaaaagttaaaagtttaaaaaaaaattaggaactaaacaaaggcttactatattgtaagacagagttagtacctctgttttaaaatataataatataagtatacttgaacaaacacgcagaaatgcttagcttttagaaagatccatacgagagaattcaagtactgaaacatcaactagcttgacaaaaaaaacaccaaaagtgtttaattaatttaatgcacttgacgggtacactgatgactatactgtgcgtgtcgcaatcaatcaaagattgggaacgcggtgatcaacgactggacggacacaaaggggatgtacgacttcttctggacgcacgcgctcatctccgacgaggccaacgacggcatcaccaagcactgcaacttcaccgacggcgccgacgccaacagcctctgcgacgacgccaccagcctcgccgacgactgcctccaggacatcgacatctacaacatctacgcccccaactgccagtcgcccggccttgtcgtctcgccgccggtcaccccctcggtaagtcagtcggtcaccgtcttcttgaccaacactcactgacgtttcagaattcgacgcgtctctgatgacgtttcaaagatgaggccgggttttcggacctcatcttttcgttttttcctatgcttatcaaccgaaatttaaatttttaacattaaatttaaaacttattttagtttttttttcatcggagtatattttcagcctatgtatttagataactaagaacacatatataaaagttttattcataaatagtttttcatttgcaaataagccaaacgataggaccgttcatctgcgtaacacctatatcatcggttaaagaaaatcaacttataaaaatgaatctagatatacgtttgttcagaattgtctctataagttgtttcttagactgaatgaatattcgacgttatgcggtggtgacggttactgggacagtgagatgaaactaaggaattgagtggctaattgctagggctaatcaggaaggttaacttgtggtgtacgtgacgtgtgcgcagattgagagctttgatccgtgcacggattactatgtggaggcctacctcaacaaccctgatgtgcaaaaggcgctgcacgcaaacatcaccaggcttgatcacccgtggtccgcttgcaggtaaacccaacaatcacccataaagaaagtatcaaaccagtattaattaagcaggcaaattcatgcataagcagataattatggctccctgttttgaccaaaatatacaggtcttcaaatattcaaatgtgcagattaattaagcagacttctgtatgcatgaagggcctgtttttgtttgttgcctaaattgcctcatcaatatttttgtaatttcaatactgtctattatctatttggactgaagccgttttagcaggcctaaatggtaggcaacatcattagttaacctcagcttcaatcaaacacaactttgtcttgccaaaatttggcattggcaaaaattggtaaggtcaattttagccccaaaccaaaccagctggaaaagagaaaattgagctcatttttctctagtagctcatcagctgaatcacagctaaatggaccagtatttactactactatgttagcatcattagagcttacaatgctttggtcagggacaacgatttcatcagtgttttttttcatgatttggccagtagtacaatgtatcaagcatcacagtgaaaccaaccgatcacaccaacttggacagatgattaggccatcaacatgacatccattattggagacacttttggtgtttcatcaatcatccaccaactgttaaaccaacctgattagtgatttgctttgctgcacaacctggaggcaatcattcatagttatgaaccctagcttgctcacattatacgaaaatcacaccacactaagctcactatttcaggttaggcgtgcactgaattatgaactgaacacagaattaattagtctcttctgtctatcatgttttattttgtctatcatgttttattccattcgtcctggatttttgtctgcaacaatatgataaactgactggtaggtgtagcacaagaaagtaggcaatacaaaaggttgctgaaaacttgcagcaattccatttcacatgaacgggcaaacttccatgagttggcatagcgtgctccaaattcgtaaaatcttgtttgaattaacaaatgacaaatgcaaggaatgcatggtgctagtttaattttgacttcatgcatactccatatcactatatgcaagatcttatctaaaacatgagagatcttataatctattctcagaacaaaaaccaggaaccttataatgcaccagcttttatagtttctttctccatgtttattcgatgcacatgacgaattgcatctagaaccacacgctgttggtttccttttttttttatatgctggtatgctctgaaactatgcgtggatgtactgggacttcaacatttttttttctttttgctcatatcagaagtctatgattgatcaccttactctttgcccatgccgcatgaattgattggcccatgtgcccatccatcgatttgattgcgtagaactttggcataatttacaaaaaagaaaatatttgatccgttttgcagtggagtcttgagacgctgggtcgacagcgcttcaacggttctgcccattatcaaggagctcctgaagaacaacatcagagtctgggtgtacaggtatgttcagcaactttcagacaatcaatcaatagataccctgatcaattatctgaaaaaatagatgctctaatccaagaaggaaatgaactagtagtattttgttgccagttttggtatatatatgcttaattcagtgtcactgatattgcagtggagacactgatgggagagtacctgtcacttccagcagatactctgtcaaccagctcaaccttccagttgctgctaaatggagaccatggtttagcaacactcaggtacttagttcctgcacttaaaactcttccttcccttcacctgttatctgaaaaaacaaagtaggaaccacttcacagaaatctgaattcatcagaaaacaaactctcgcaggccagtatggaagtaaattctacccaaattcgaactttagaagctcataccatgaatactagtttttgttaggatttagaaattgtattgatctgtttcaatcttgtgaaattcagggtgttggagacgttggtggatacattgtgcagtacaaggggaacctcagccttgtaaccgtgagaggagcaggccatgaagtccccagctaccagccacagcgagcgcttgtgcttgtccagtatttccttgaaggcaaaacgctacctgattgcgaaaaatgtggagaggct

SEQ ID NO: 4527 - DNA, 1884 bp, Hordeum vulgare subsp. vulgare
ggccgtctccagtccagtccagtccagtccagcgtgctcgctccgaccgcccgtccgatcgagcagaaccggcgcgagcagcgcagtcacgcgccatgaagtgcacagtggtggcactcgtgctgctggtggcggtgcaatgcctcgtgctgggcgccggcccggccgcggcggcgaaggcgcggcggacgcggcagggcgactacctgaaccggctgcggggctcgccatcctcccgcgcgtcgtgggagtcgctggcggcagtggaggagcagacgacgacgaaggcggcgggtagacccgcgccggtggccgctgcggtggaggctgggaggaaggaggccgaccgcgtggaggcgctgcccgggcagccgcgcggcgtggacttcgcgcagtacgccggctacgtgacggtggacgcggcggccgggcgtgcgctgttctactacctcgccgaggccgtcggcggcaacggcgacaagcccaagcccctcctcctgtggctcaacggtggccccgggtgctcgtcgctggggtacggcgccatggaggagctcggcccgttccgcgtcatgagcgacggcaagacgctctacagcaacccctactcctggaaccacgcggcgaacgtgctgttcctggagagcccggcgggggtggggtactcgtactcgaacacgacggcggactacggcaggagcggggacaacgggacggcggaggacgcgtaccagttcctggccaactggctggagcgcttcccggagtacaagggccgcgagttctacatcaccggcgagagctacgccggccactacgtcccgcagctggcccacgccatcctccgccacgcatccccggccatcaacctcaaaggcatcatgattgggaacgcggtgatcaacgactggacggacagcaagggcatgtacgacttcttctggacgcacgcgctcatctccgacgagacggctgacggcatcagcaagaactgcaacttcacggcctacggcgccggcgtggcgtcgaacgcgctctgcgacgccgcctcggacgaggtcggcgagagcctcgcggacatcgacatctacaacatctacgcgcccaactgccagtcggagaagctcgtcacgccgcccatcgccccctcgatcgacaactttgatccgtgcacggactactacgtggaggcgtacctcaaccggccggacgtgcagaaggcgctgcacgccaacgtcacccgcctcgaccacccctggtcagcctgcagtgacgtcttgacacgctgggtcgacagcgccaaaactgtcctgcctattatccaggagctgatgaagaacagcatccgggtctgggtttacagtggagacactgatgggagagtgcccgtcacttccagtagactctctgtcaaccagctccagctccctgtggcggcaaaatggaggccatggttcagcagcaccaagggtgccggagaggtgggtggatacattgtgcagtacaagggcgacctcagcttggtaactgttagaggagcaggccatgaggtccccagctaccagccgcggcgagcgcttgtgcttgtccagaatttcctcgcaggcaaagcgctccctgactgcaaagaatgcgaacaggattagcaaaagaaaagaaggttttacactaaaagatagtacaccagcaggtttcacaggttgtatcatttgattcagtacaagaaacaagcaaaatcaagtaaagttagatacagaaacccatcatcaacccatgcactccgcagaccatgtaactgcaggtcagcaaatgctttcatatagataggaaagtgtatggtgtaatttgttaagtatgaacatctatgccaaaatggcatgttgc

SEQ ID NO: 4528 - DNA, 747 bp, Oryza sativa Japonica Group
ctcctctattgcagccgccgccgctcccagctcgcgctcccctcgccgccgcagccgccgccgcctcgcctcctcggagatcttcgctgcccttccgtcaacatggggaagacacgtggtatgggagctgggcgcaagctcaagacccaccgcaggaaccagagatgggcagacaaggcctacaagaagagccacttgggtaatgagtggaagaaaccctttgctgggtcatctcatgccaagggcatcgttctggagaagattggtattgaggccaagcagcccaactctgccatccgtaagtgtgctcgtgtgcagcttgtgaagaatgggaagaagattgctgcctttgtgcccaatgacggttgcctgaacttcattgaggaaaatgacgaggtgttgattgctggatttggtcgtaagggccatgctgtgggagatattcctggtgtccggttcaaggtcgtcaaggtctctggtgtgtctctgcttgctctcttcaaggagaagaaggagaagccgaggtcttagattactggtacatcttggttggcaagcatggaatagacagaatgaaaggctttagatgctcaagaatgaaggctttagatgctcaagaagatggttccttgctatgtttaaagtgcgctctttatattgttaacttaagattgtgttggtaaaaaccatgccttgtcagatttttgcttctgttaaggggaaagtactgtgctgagctattttctc

SEQ ID NO: 4529 - DNA, 945 bp, Zea mays
atttgcatctgagttcctgattgttgtattccagtttcttctgtgagttttgtgggatcgcgaggaagaactagaaggatgtcgtgctgcggaggcaactgcgggtgcggcgccggctgcaagtgcggcagcggctgcggagggtgcaagatgtacccggacatggctgagcaggtgaccaccactacccagactctcatcatgggtgttgcaccctcctgccgccgccgccgctcccgctcccagctcgtgttccgcttcttgcagccgtcgccgcgaagcgctccagagaacttccgtcaacatggggaagacacgtggtatgggagccgggcgcaagctcaagacccaccgcaggaaccagcggtgggctgacaaggcatacaagaagagccatttgggcaatgagtggaagaaacccttcgctgggtcatcccatgccaagggcattgtcctggagaagattggtattgaggccaagcagcccaactccgctatccgtaagtgtgctcgtgttcagcttgttaagaatggcaagaagattgctgccttcgtgccaaatgacggttgtttgaactacattgaggaaaatgatgaggtcttgattgctggatttggtcgtaagggccacgctgtgggagatattcctggtgtccggttcaaggtcgtcaaggtttccggtgtgtctctgcttgcccttttcaaggagaagaaagagaagccaaggtcttagattgctcttgctaccaaaatcagcaagcgtggagttgaaacgggagggcgttagatgattaagaagaatggttgcttgctatgtttgcagtgcattcgtgcaattgttaacctaagattttgttggtgaaaacgatttcttttcagacttgcttctgttgagtgctatcattccatatcaatgtacttcctcttctaaaaaaaaaaaaaaaa

SEQ ID NO: 4530 - DNA, 877 bp, Zea mays
atatttttttttttcttgcccctctcgatcccgccgccgacgccgacgccgcagccgcagccttagccttgccttcgaactcgaagcccgttgcatccggctaccgcagcgtcgccaaccgtcacagccggtctcctccctccgctaccatggggaagacacgcggtatgggagctgggcgcaagctcaagacccaccgcaggaaccagaggtgggctgacaaggcatacaagaaaagccacttgggcaatgagtggaagaaaccttttgctgtatcatctcacgccaagggcatcgttctggagaagattggtattgaggccaagcagccgaactctgccatccgtaagtgtgcccgtgttcagctggtgaagaatgggaaaaagattgctgcctttgtgccaaatgatggttgcctaaactacatcgaggagaatgatgaggtgttgattgctgggtttggtcgtaagggccatgctgtgggagatatccctggtgtcaggttcaaggttgtgaaggtatctggtgtgtcgctgctcgcgctcttcaaggagaagaaggagaagccaaggtcttagatcactttcgatagtcaagaatggagtaaactgacaggctctactatggagtaaactgccaaggttttagatcactttcgatagtgaggttcaaggttgtgaagtttagcgacagagctgttaattctgagctgtactttttgttaacattgctatcgagactcgagagttttgttcccattttgaagtattaatattgcatcggcatgtgccgattcttacmaaaaaaaaaaaaaaaaaaaaaaaaaaacaaaaaaaaaaaaaaaaaaaaaaaaaaaaaaggaaaaaaaaaaaaaaaa

SEQ ID NO: 4531 - DNA, 429 bp, Elaeis guineensis
atggggaagactcgtggtatgggagctgctcgcaagctcaaaacccacaggaggaggcaaagatgggcagacaaagcatacaagaaaagccatcttggcaatgagtggaagaagccctttgctggttcttcacatgccaagggcattgtccttgagaagattggcattgaagctaagcaacccaactctgctatccgaaagtgtgccagagttcagcttataaagaatgggaagaaaattgcggcttttgtgccaaatgatggttgcttgaacttcattgaagaaaatgatgaagtattgattgctggatttgggcggaagggtcatgcagttggtgatattcctggagtaaggttcaaggttgtgaaggtttctggtgtgtcgctgctggcactcttcaaggaaaagaaagagaagccgcggtcttaa

SEQ ID NO: 4532 - DNA, 429 bp, Elaeis guineensis
atggggaagactcgtgggatgggagctgctcgcaagctcaaaactcacaggaggcggcaaagatgggcagacaaagcatacaagaagagccatcttggcaatgagtggaagaagccctttgctggttcttcacatgccaagggcattgtccttgaaaagatcggcatcgaagccaagcagcccaactctgccatccgaaagtgtgccagagttcagcttataaagaatgggaagaaaattgcagcctttgtgccaaatgatggttgcttaaactacatcgaagaaaatgatgaagtgttgattgctgggtttggacggaaggggcatgctgttggtgatattcctggagtaaggttcaaggttgtgaaggtttctggtgtgtcactactggcactcttcaaggagaagaaagagaagcctcggtcttaa

SEQ ID NO: 4533 - DNA, 728 bp, Solanum tuberosum
gctctcaccctccagctgctgcagcgagacaacttccttctgtcacaatggggaagacacgtggaatgggagctggtcgtaaacttaagtcccaccgtcggaggcagaggtgggctgacaagtcttacaagaaatctcatcttggtaatgaatggaaaaagccatttgcaggatcatctcacgccaaggggattgttcttgagaaaattggtattgaagctaagcagcctaactctgccattagaaagtgtgctcgagttcagttgataaagaacgggaagaagatagctgcttttgtacccaatgatggttgtttgaactacattgaagagaatgatgaggtgttgattgctggatttggtcgtaaaggacatgctgtgggagatattcctggtgttaggttcaaggttgtgaaggtgtctggtgtttcacttttggctctcttcaaagagaagaaagagaagcccagatcttaattatcactttctggtcaaatgcaagtgtgttctgaatgattttttgttaggatacaaaatacccttttcttttccctaattttcgactagtatagtttgtcaggcgtccatgaatatatccaggacatttgtttcaccttctgaaaatgaatgatgttgtgtggaattttggatcaagctgttggaagttgaaagcaattagttttccttcccaatataagagtacttttttgaaaaaaaaaaaaaaaaaaa

SEQ ID NO: 4534 - DNA, 665 bp, Ricinus communis
ccatctgctcttgtttgctgctgctcaatctcaggcaacatggggaaaacacggggaatgggagctgctcgtaagctgaaatctcaccgcagaagacagaggtgggctgataaggcatataagaaatctcatcttgggaatgagtggaagaaaccatttgctgggtcatctcatgcgaaagggattgttctagagaaaattggtattgaagctaagcagccgaactctgctattagaaagtgtgctcgtgttcagctgattaaaaacgggaagaagattgctgcctttgtacctaatgatggttgcttgaactacattgaggaaaacgatgaagttttgattgctggatttggacgaaaggggcatgctgtgggagatattcccggagttaggttcaaggttgtcaaggtttctggtgtctcccttctggctttgtttaaagagaagaaggaaaagcctaggtcttaggttgttgttggaagtcttttacctcttcgagttgcccattttcacctagctgatagtgagcattatgtaatgcagaattttgtgaacaacttttttaatctctgaagttagaatctgaatctgtttgtcatgagcattcaaaattatttaatagtatgtacggtgtttatgtttggcaacatgcttgtttttttgtc

SEQ ID NO: 4535 - DNA, 918 bp, Vitis vinifera
gatctccaggattagggttttactcggcggctccttcttcctcctccaagctctcaaaccctagccgcagttgaacaacttctctccgtcgccatggggaagacgcgtggaatgggagctggtcgcaagttgaagtcccaccgtagaaggcaaaggtgggctgacaaggcatacaagaagtctaaccttggaaatgaatggaagaagccatttgctgggtcttctcatgcaaaaggcattgttcttgagaagattggtattgaggctaagcagccaaactctgctatcagaaagtgtgccagagttcaactaatcaagaatggcaagaagattgctgcatttgtcccaaacgatggttgcttgaactacatcgaggagaatgatgaggtgttgattgctggatttggacggaaggggcatgctgttggagatattcctggtgttaggttcaaagttgtgaaggtctctggtgtctctcttctggctctcttcaaagagaaaaaagagaagccaaggtcttagttttcttcaaggagttcaacctcacctacagtcttttgatacccttacctaagaattcggaatggttatttttattgttgagtggattttgtgaaccatctttgatctattttctagttaattgttatgaaacttggcagtgttacttgtgatcttagacaaacaattcttatttgtcatctttccttaatcccacttctatgtaccctgttgaaattactgaggacaggactggtagcatgggtaatgcttgctaaggagaaaaagccattgttccgcgcccaggactaaacaaggaagtttccatctataaactgcttattacagggccatttcctggtttaaactttcagttatattttcccatggaaattgccagcatgtggtttttagccg

SEQ ID NO: 4536 - DNA, 687 bp, Zea mays; identical to SEQ ID NO: 1578

SEQ ID NO: 4537 - DNA, 522 bp, Sorghum bicolor
atgacgacgagctgcgagttcgccgccgtcctggcgctccggtcgaaccgcagccgaccatcatctccgccgccgccgctgctgccggcttccgtggccaataagaaacccgctgcctcctcctccacctccacgcgacgatggcgctgcgcgtcgtcccgccgcgacgacgacgcggatgagttcagctgcaacggcaccggcggcggcggcggcggggggcggatggtggacgaggggatggtggtcctgcggcgacggatccacgagatggaggccccggagcgcgggtgggagcctccccaggagtgggcggcgtgggagaaggagtggtacgccacctacgacgccgacgtctgccacctcctcggcgtcctccaggcgttcctcgtcagctcccggcccggcgtcggcgtcgggctcgtcgccgtgctcgcgctcgcggtgccggcctccgcctttgtcctcgtctcactcctcctcgacgcttcgcgggcgatcgtctccagtctgcaccagtga

SEQ ID NO: 4538 - DNA, 1389 bp, Sorghum bicolor
atggccatcgtccccaacaccccctcgccgtcgccgccgtgtatatatgtgctggagcgcaccgcctctctcagggcacgggcaccggcacgcagcctccatccgatccccggaccccagcacgagatacatacaccgatggcgttcatcagcaacgacgtcgtggcgatgaaggcggcggccgtgtccgctctgctggtgttcgcggcggtggcgtcgcccgccgcgggcgcgccggcggtggcggtggcgggaggcgcggcgtcgatgcccgcgggcccgctggacatcgcgcagctgggcgccaagggcgacggcaagtcggacagcaccccgatgatcctcaaggcgtggaagaacgcgtgcgacgcgaccggggtgcagaagatcgtcatcccgccgggcaactacctgacgggcgggctggagctcaagggcccctgcaagtcctccatcatcatccgcctcgacggcaacctgctcggcaccggcgacctcaacgcgtacaagcgcaactggatcgagatcgagaacgtcgacaacctgtccatcaatggccacggcaccatcgacgggcagggctccctggtgtggaacaagaacgactgccagcattcctacaactgcaaggtcctccccaatagcttggtgctggactttgtgacgaacgcccagatcaggggcatcacgctggccaacagcaagttcttccacctcaacatcttcgcgagcaagaacgtgttgatcgacaaggtgacggtgaaggccccggggaacagccccaacacggacggaatccacatgggggactctgagaacgtgaccatcagcggcaccaccatcggcgtcggcgacgactgcatctccatcgggcccggcagcaagacgatccggatcgacggcgtcaagtgcggccccggccacggcatcagcgtcgggagcctggggaggtacaaggacgagaaggacgtggaggacgtgaaggtgaaaggttgcacgctggtgggcaccaccaacggcctgcgcatcaagtcgtacgaggactccaagtcgtcgcccaaggtcaccaagttcgtgtacgaggacgtgaccatggacaacgtctcgtacccgatcatcatcgaccagaagtactgcccgaacaacatctgcgtcaggtccggcgcgtccaaggtggccgtcaccgacgtcgtcttcaagaacatccacggcacctccaacacgcccgaggccatcacgctcaactgcgccgacaacctgccatgccagggcgtgcagctccacaacgtcgacatcaagtacaacaagtccaacaacaagaccatggccgtctgcaagaacgccgtcggcaagtccttcggcttgtcaaaggagctcgcgtgcatctga

SEQ ID NO: 4539 - DNA, 2231 bp, Zea mays; identical to SEQ ID NO: 1579

SEQ ID NO: 4540 - DNA, 2375 bp, Oryza sativa Japonica Group
atcaacagggtgatactgccagcttcttctcaactcgacataagagctccctggcttctctgtaggggggtcactttggtcgatggagggggggacgaagaaagttttcacagttcaggtggaggatggaaagcccaggaaggacggccggccggcggtagggccagtgttcaggagtgcactgtcaaaggatggattcccgccacttgagcctgacatgaaaacatcatgggacgtgttcagggtcgcagcaggcaagtacccagataatcggatgctcggatggcgtcctgtaaaagatggagtgatagggccatacatatggaaatcatacagggaagtgtatgaagaagtcctgcaagttggatctgctttgcagcagctgggggtgaagccaggttcccggattggaatatatggatcaaactgccctcagtggatagtagcaatgcaggcttgcaatggttacagcttaatctgtgtcccactctacgatacgttaggtgcaggagctgttgacttcattattgaccatgctgaaatcgatgttatctttgttcaggacaagaaaataaaagaaatactgtccgcaaattgcaagtctgctaagagagtgaaaggactggtggcatttacttcgggaacaagcgaagaaatcacaagtgctgatcagattgggatgaagttgtactcgtggaaagatttcttaaaaatgggaaaggaaaatccagcccaaccttgtgctccaaaaccaaatgatacatgcaccatcatgtacacaagtgggacaagtggagagcccaaaggtgtcatgcttagccatgagagtcatgccatatatgtgaaaggtgtggacctcttcatggagcagtttgacgataagatgacaacagatgatgtgtttctttcctttctaccgcttgctcacatccttgaccgcatgatcgaggagtttttctttcacaaaggagcctcagttggctattatcatggggatttgaatgccttgagagatgatctcatggagctaaagccaactctactagttggggtgcctcgagtgtatgaaaaaatttatgaaggtatcttgaaggccttatcagaactcagaccactcagaagattaattttcaatgctctgtataaccgcaaactggcaaacatgaaagcaggctgcacgcacaaaactgcttcaccttttgcagatatgttggctttccgcaaggtcaaagcaaggcttggtggtcgtcttcgcctattaatctcgggtggggctccattaagtaatgagatcgaagagttcttgagagtaaccagctgcgcatactttatccaaggctatggtttaacagaaacactgggacctagcacggtctgttaccctgatgacatgtccctggttggaactgttggcgtggctgctacctatacggaattgcgattggaagaagtgcctgagatgggttacaatccacttggtactccttcccgtggtgaaatatgcgtccgaggaaacttcttcaccggatactataaaaatcctgagctcacgaatgaggtcatggctgatggatggtttcacacaggtgacattggagagatgaactcagatggaatcctgaaggtaattgaccgaaagaaaaatatattcaagttgtcacaaggggagtatgttgcagttgaatacctggagaaagtatatgttttccctccaaccgttgaagatgtctgggtatatggggacagcttcagatcaatgttagtggcagtagttaatccacatgaagagaacaccatgaagtgggcagaatcaaatggctgcaagggttcttttgctgaaatatgcaagtctgaaggccttaaagagcatatcctgaaagagctgcaatctgttgcagcaaagaacaagctacggggatttgagtatgtcaaaggtgtaatattggaccctattccttttgaccttgaaagggatttggtgactgcaacaatgaaaaagaaaagaaacaacatgctaaaatattacaagcctgagattgagaaagtataccaaaaactggaggaacagagggttgccgccaaatcaaagtaaagaaatatgttccctttgaacactaaatgaaaagctagaatgccattgtaaatttttcaatttttagataatggatatcgttccggcctctacatgtaaattttcagttgaactttggtactcaagattacatgaatgcaataaaatgtatatcgtgtgatgccttgtgtagctattaccccccttcatctcatcttacatatatggaatatgatgagcactacagaagtttgtgctacaccacatacttcgaagatactgaatgagatatcaggtattgaaa

SEQ ID NO: 4541 - DNA, 2251 bp, Oryza sativa Japonica Group
atcaacagggtgatactgccagcttcttctcaactcgacataagagctccctggcttctctgtaggggggtcactttggtcgatggggggggggacgaagaaagttttcacagttcaggtggaggatggaaagcccaggaaggacggccggccggcggtagggccagtgttcaggagtgcactgtcaaaggatggattcccgccacttgagcctgacatgaaaacatcatgggacgtgttcagggtcgcagcaggcaagtacccagataatcggatgctcggatggcgtcctgtaaaagatggagtgatagggccatacatatggaaatcatacagggaagtgtatgaagaagtcctgcaagttggatctgctttgcagcagctgggggtgaagccaggttcccggattggaatatatggatcaaactgccctcagtggatagtagcaatgcaggcttgcaatggttacagcttaatctgtgtcccactctacgatacgttaggtgcaggagctgttgacttcattattgaccatgctgaaatcgatgttatctttgttcaggacaagaaaataaaagaaatactgtccgcaaattgcaagtctgctaagagagtgaaaggactggtggcatttacttcgggaacaagcgaagaaatcacaagtgctgatcagattgggatgaagttgtactcgtggaaagatttcttaaaaatgggaaaggaaaatccagcccaaccttgtgctccaaaaccaaatgatacatgcaccatcatgtacacaagtgggacaagtggagagcccaaaggtgtcatgcttagccatgagagtcatgccatatatgtgaaaggtgtggacctcttcatggagcagtttgacgataagatgacaacagatgatgtgtttctttcctttctaccgcttgctcacatccttgaccgcatgatcgaggagtttttctttcacaaaggagcctcagttggctattatcatggggatttgaatgccttgagagatgatctcatggagctaaagccaactctactagttggggtgcctcgagtgtatgaaaaaatttatgaaggtatcttgaaggccttatcagaactcagaccactcagaagattaattttcaatgctctgtataaccgcaaactggcaaacatgaaagcaggctgcacgcacaaaactgcttcaccttttgcagatatgttggctttccgcaaggtcaaagcaaggcttggtggtcgtcttcgcctattaatctcgggtggggctccattaagtaatgagatcgaagagttcttgagagtaaccagctgcgcatactttatccaaggctatggtttaacagaaacactgggacctagcacggtctgttaccctgatgacatgtccctggttggaactgttggcgtggctgctacctatacggaattgcgattggaagaagtgcctgagatgggttacaatccacttggtactccttcccgtggtgaaatatgcgtccgaggaaacttcttcaccggatactataaaaatcctgagctcacgaatgaggtcatggctgatggatggtttcacacaggtgacattggagagatgaactcagatggaatcctgaaggtaattgaccgaaagaaaaatatattcaagttgtcacaaggggagtatgttgcagttgaatacctggagaaagtatatgttttccctccaaccgttgaagatgtctgggtatatggggacagcttcagatcaatgttagtggcagtagttaatccacatgaagagaacaccatgaagtgggcagaatcaaatggctgcaagggttcttttgctgaaatatgcaagtctgaaggccttaaagagcatatcctgaaagagctgcaatctgttgcagcaaagaacaagctacggggatttgagtatgtcaaaggtgtaatattggaccctattccttttgaccttgaaagggatttggtgactgcaacaatgaaaaagaaaagaaacaacatgctaaaatattacaagcctgagattgagaaagtataccaaaaactggaggaacagagggttgccgccaaatcaaagtaaagaaatatgttccctttgaacactaaatgaaaagctagaatgccattgtaaatttttcaatttttagataatggatatcgttccggcctctacatgtaaattttcagttgaactttggtactcaagattacatgaatgcaataaaatgtatatcgtgtg

SEQ ID NO: 4542 - DNA, 1943 bp, Sorghum bicolor
aaacttcacatcacgcctccgcggctccgcgttccacctctttctatctcacctccacgtcaccgtaacctcgtcctccccatccccttacgcgacgcgactcaggcgccttcccatcggaaccctaatcctctctttccctactcgcggaagccaccaccaccaccggcaggggaagcggaagagaagcacctcggccccggcaagatggtgcttgcgcagctgggcgggagcatctcccgcgccctggcgcagatgagcaacgccacggtgatcgatgagaaggtgctcaacgactgcctcaacgagatctcgcgcgcgctcctacaggccgatgtccagttcaagatggtccgcgacatgcaggccaacatcaagcgcatcgtcaacctcgaggcgcttgccgcaggcaccaacaagcgccgcatcatgcagcaggctgtcttcacggaactctgcaacatgttagatcccgggaagccttccttcactcccaaaaagggcaagccaagcgtagtcatgttcgttggtctgcaaggttctggtaaaactaccacttgtacaaaatatgcttattatcatcagaggaaaggattcaaaccagcgctggtttgtgccgatacatttagggctggtgcttttgatcagttaaagcaaaatgcaacgaaggccaagattcccttttacggaagctacatggaatccgatccagtgaaaattgctgttgagggtgtggagaggttcaagaaagaaaactgtgatctcatcattgtggatacaagtggaaggcacaaacaagaagcagcactctttgaagaaatgcggcaagtttcggaagcaacaaaaccagacttggtgatttttgtgatggacagtagtattggtcaggctgcatttgatcaagcacaggcatttaaacaaagtgtttctgttggtgctgtgattattacaaaaatggatggtcacgcaaaaggcggtggtgcccttagcgcggtcgcagcaacaaaaagtcctgttatattcattggaactggagagcacattgatgagtttgaagtttttgatgtgaagccatttgttagtcgcttgttaggtatgggagattggtcaggctttatggacaagattcatgaagtggtacctacagatcaacagcctgagcttctgcagaaactgtctgaaggaagctttactctcagacttatgtatgagcagttccagaacattctgaaaatgggtcctattggccaggtcttctctatgttgcctgggtttagcgctgaactaatgccaaaaggacatgagaaggaaagccaggctaagattaagcgctacatgacgatgatggattccatgactgaagcagagcttgacagcacaaatcctaagctgatgaccgaatcacggatcattcggattgcacggggttctggccggcctgtcagggatgtcatggacatgctggaagagtacaagcggcttgctaaaatctggggcaagatgaagggtctcaagatcccaaagaaaggggagatgagtgcactgtcccgcaacatgaatgttcagcacatgagcaaggtccttcctccgcagatgcttaaacagattggtggcatgggtggtctgcagtctctgatgaaacagatgggatcgaaggagatgagcggaatgtttggaggcatgggtggcgagcggtaattttacatcgagtcctgtttttggtggatcgttgttgtgatgctaaattgagaggctttagtgctgcggtctggtcatcatcagagctttcccattacttcagcctgcgccatgttatggaacaggtttagtgtagctcccagtgcctgaaaatttaattttatatagacagtatgtttgtccttggaaaaatggatgaggtatatatttgacaaagcgaatatgcttatatagattgttactcc

SEQ ID NO: 4543 - DNA, 1872 bp, Zea mays
tctacgtcaccgtaacctcctccacccatccccgttctcacgcggctcgctcagggctcgagcgtctccccatcggaaccctaatcctctctttccctactcgcggaaaccaactccaccggcaggggaagcggaagggaagcacctcggccccggcaagatggtgctcgcacagctgggcgggagcatctcccgcgccctggcgcagatgagcaacgccacggtgatcgatgagaaggtgctcaacgagtgcctcaacgagatctcgcgcgcgctcctacaggccgatgtccagttcaagatggtccgcgacatgcaggctaacatcaagcgcatcgtcaacctcgaggcgcttgccgcaggcaccaacaagcgccgcatcatgcagcaggctgtcttcacggaactctgcaccatgttagatcccgggaagccttctttcactcccaaaaagggcaagccaagcgtagtcatgttcgttggtctgcaaggttctggtaaaactactacttgtacaaaatatgcttattatcatcagaagaaaggattcaaaccagcactggtttgtgctgatacatttagggctggtgcttttgatcagttaaagcaaaatgcaacgaaggccaagattcccttttatggaagctacatggaatctgatccagtgaaaattgctgttgagggtgtggagaggttcaagaaagaaaactgtgatctcatcattgtggacacaagtggaaggcacaaacaagaagcagcactctttgaagaaatgcggcaagtttcggaagcaacaaaaccagacctggtgatttttgtgatggacagtagtattggtcaggctgcatttgatcaagcacaggcatttaaacaaagtgtttctgttggtgctgtgattattacaaaaatggatggtcacgcaaaaggcggtggtgcccttagcgcggtcgcagcaacaaaaagtcctgttatattcattggaactggcgagcacattgacgagtttgaagtttttgatgtgaagccatttgttagtcgcctgttaggaatgggagattgggcaggctttatggacaagattcatgaagtcgtacctacggatcaacaacctgagcttctgcagaaactgtctgaaggaagctttactctcaggcttatgtatgagcagttccaaaacattctgaaaatgggtcctattggacaggtcttctctatgttgcctgggtttagcgccgaactaatgccaaaaggacatgagaaggaaagccaggctaagattaagcgctacatgacaatgatggattccatgactgatgcagagcttgacagcacaaatcctaagctgatgactgaatcacggatcattcggattgcacgggggtctggtcgtcctgtcagggatgtcatcgacatgctggaagagtataagcggcttgctaaaatctggggcaagatgaagggtctcaagatcccaaagaaaggggagatgagtgcactgtcccgcaacatgaatgttcagcacatgagcaaggtccttcctccgcagatgcttaaacagattggtggcatgggcggtctgcagtctctgatgaaacagatgggatcgaaggagatgagcggaatgtttggaggcatgggtggcgagcggtaattttacgtcctgtttttggtggatcgtcgctgtgaacttgtgatgctaaattgagagggtttagtgctgcggtctgatcatcgtcagaggtttccatgaagatcagcctgcgccatgttatggaacaggcttgctgtagctccccatgcctgaaatttaatttatatgattatgaacagtacatttgtcctcgaaaaaatgtataagatataatatttgac

SEQ ID NO: 4544 - DNA, 2038 bp, Oryza sativa Japonica Group
tattattattcttttgaaaaaaagaatagtgttacacacacgcgtactccgtgccttcccgtcggaggaatccccggtattcaaccgagtcgccccccatctgaggattaccaccacctccacggctccacctccgcggcggcgtaatccatccaactcgcaatagatatacagtccccccaatcgacggaaccctaattctctcccgcacgcgcgtcggcgatccgaggggaagtagggtttggaggaggaggaggggagaccaccggaggtaggcgaatcccccaaggccgggcaagatggtgctcgcgcagctcggcgggagcatctcccgcgcgctggcgcagatgagcaacgccaccgtgatcgacgagaaggtgctcagcgactgcctcaacgagatctcgcgcgcgctcctgcagtccgacgtccagttcaagatggtccgcgatatgcagtccaacatcaagcgcatcgtcaacctcgagacgctcgccgccgggaccaacaagcggcgcatcatccagcaggccgtcttcacggagctctgcaacatgttggatcccgggaagccttccttcactcccaagaaggggaaaccttgcgtggtcatgttcgttggtttgcaaggttctggtaaaactactacttgtaccaaatatgcatattatcatcagcgcaagggatttaagccagcacttgtttgtgctgatacatttagggctggtgcttttgatcagttaaaacagaatgcaacaaaggccaagattcctttttacggaagctacatggagtctgatccagtgaaaattgctgttgagggtgtggagaggttcaagaaagaaaactgtgatctcatcattgtagatacgagtggaaggcacaaacaagaagcagccctttttgaagaaatgcgccaagtttcagaagcgacgaaaccagatctggtaatatttgtgatggacagtagtatcggtcaggctgcatttgatcaggcacaagcatttaagcaaagtgtttctgttggtgctgtgattgtcactaaaatggatggccatgcgaaaggaggtggcgcacttagcgcggttgcagcaacaaaaagtccagtgatatttattggaacaggagaacacatcgatgagtttgaagtttttgatgtgaaaccatttgtcagtcgtcttttaggcatgggagactggtcggggtttatggacaagattcatgaagtagtacccactgatcaacaacctgagcttttgcagaagctgtctgaaggaaccttcactctgagacttatgtatgagcagttccagaacatcttgaaaatgggtcctattggccaggttttctcaatgttgcctggatttagttctgaattgatgccaaagggacatgagaaggaaagccaagctaagattaaacggtacatgacgatgatggattccatgacagatggagagcttgacagcacaaatcctaaattgatgactgaatcgcgtattcttcggattgctcggggatctggccgacctgtcagagatgttgtcgacatgctcgaagagtacaagcggcttgctaaaatctggagcaagatgaaagggctcaagataccaaagaaaggagaaatgagtgcactgtcccgcaacatgaacgttcagcacatgagcaaagttctcccgccgcagatgctgaagcagataggcggcatgggtggcctgcaatctttgatgaaacaaatgggctcaaaagaaatgggtggcatgtttggaggcatgggtggtgataagtaaacagatcctgattgcatttgacaaatcgtcagagatatggctgtagacagattgttcaccagggtgctaaatgagagttttgaagatgatactgactgctgcaattatgttaccagatgaggatacacatgcaccccgatgtaaaatttgtttatcataggcaaatcgtagctccccaaagttcttaccgagattttatttatagaatctgtttgggaagaattaccgaatccgcgttttgttttgtt

SEQ ID NO: 4545 - DNA, 1494 bp, Ricinus communis
atggtgttagcacaattaggagggagtatatcccgtgccatacagcagatgagcaatgctaccataatcgatgagaaagcattgaacgattgtctcaatgagatcacacgcgctcttcttcagtctgatgttcaattcaagcttgttcgtgatatgcaaaccaatatcaagaaaattgtcaatcttgatgatcttgctgctggtcataataagcgtaagatcatacagcaggcaatatttaatgagctttgcaaaatgttggatcctgggaaaccttcatttactccaaagaaagggaaaacaagtgtagttatgtttgttggtttacaagggtctgggaaaaccacaacttgtactaaatatgcatattatcatcagaaaaaaggttggaaaccagctttagtttgtgctgatacattcagggctggtgcttttgatcagctgaagcaaaatgccactaaagctaaaattccattttatggaagttatatggaatcagatcctgtgaagattgctgtggaaggagtggaaagatttaagaaagagaattgtgatcttataattgttgataccagtggacgacataaacaggaagctgccctttttgaagaaatgcgccaagtgtctgaagcaacgaaaccagatcttgttatttttgttatggatagcagtattggtcaagctgcttttgatcaagctcaagcatttaagcaaagtgtcgcagttggagctgttattgttaccaaaatggatggtcatgcaaagggtggtggcgcgcttagtgctgttgcagcaacaaagagtcctgttatattcattggaacaggagagcatatggatgaatttgaagtttttgatgtcaaaccttttgttagtcgccttttaggcatgggtgactggtctggatttatggacaaaattcacgaggtagttcctatggatcaacagcctgagcttctgcaaaaactttcagaaggaaactttaccttgaggattatgtacgagcaatttcagaatattctcaagatgggtcccattggccaggtattttcgatgcttccaggatttagtgctgaactaatgccaaaaggtcgtgaaaaggagagccaggcaaagattaagcgatatatgaccatgatggattcgatgacaaatgaagaactggatagctctaatccaaagcttatgaacgactctcgtattatgaggatagcacggggttctggccgccaagttagagaagtaatggagatgtttgaagaatacaaacgtctggccaaaatttggagcaagatgaagggacttaagattcctaagaagggtgaaatgagtgccctgtccagaaatatgaatgcacaacacatgagcaaagttctccctccacaaatgctgaagcagataggtggcatgggcggcttgcaaaatttgatgaagcaaatgggttctgccaaggacatgatggggatgtttggaggtggggaaaataaagtgtaa

SEQ ID NO: 4546 - DNA, 1479 bp, Populus trichocarpa
atggtgttggcgcagttaggagggagcatatcccgagcaatccagcaaatgagcaatgcaacaatcatcgacgagaaagcattaaacgactgcttgaacgagatcactcgcgcgcttcttcaatccgatgtccaattcaagcttgttcgcgacatgcaaactaatatcaagaaaatcgtcaatctcgacgatctcgctgccggtcacaacaagcgcagaatcatccaacaagcgatatttaacgagctctgcaagattttggacccagggaagtcctcatttaccccaaagaaggggaaaactagtgttgttatgtttgtaggtttacaagggtctggaaaaacgacgacgtgtacaaaatacgcttattatcatcagaaaaaaggatggaaacccgccctcgtttgcgctgatacgtttagagctggtgcatttgatcagttaaagcagaatgcaactaaagctaaaattccattttatggaagctatacggaatcggatcctgtaaaaatagctgaggaaggtgtagaaacatttaagaaggaaaattgtgatcttataattgttgatacaagtggacggcataaacaggaagctgcactttttgaagaaatgcgtcaagtttcagaagcaactaaaccggatcttattatatttgttatggatagcagtattggtcaagctgcatttgatcaagctcaagcttttaagcaaatggttgcagttggagctgtgattattactaaaatggatggtcatgcaaagggtggtggtgcgcttagtgcagttgcagcaactaagagtcctgtcatttttattggtactggagagcatatggatgagttcgaagtctttgatgttaaaccttttgttagtcgccttttaggcatgggtgactggtctggattcatggacaaaattcatgaggttgttcccatggatcaacagcccgagcttctacaaaagctgtcagaagggaactttaccttaaggattatgtatgagcaattccagaatctactaaaaatgggtcccattggccaggtattttcaatgcttcctgggtttagtgctgaattaatgccaaaaggtcatgaaaaggaaagccaggctaagattaagcgatacatgaccatgatggattcaatgactaatgaagagttggatagttcaaatccaaagctcttgaatgactcacgaatgatgaggatagcacggggtgctggccgtccaattagagatgtaatggaaatattggaagagtacaagcgacttgctaaagtctggagcaaaatgaaggggcttaagattccgaagaagggtgagatgagttccctgtctagaaacatgaatgcacagcacatgagcaaagtcctccctccacagatgctgaagcagattggtggcatgggtggtttgcaaaacttaatgaagcaaatgggatcagctaaagacatgatgggcatgtttggaggcggg

SEQ ID NO: 4547 - DNA, 1986 bp, Vitis vinifera
tcctcataagaaacctaacccccaaactctcacgaatttgtcacggatcctgcgttcttctgcaatcgatcaagatggtgttatcagagttgggcgggagcatatcgcgtgctctccagcagatgagcaatgccacaatcatcgacgagaaagtcctgaatgaatgcctcaacgaaatcacccgcgctctcctgcaatccgatgtgcagttcaagctcgtccgggatatgcagaccaatatcaagaagctcgtcaatttcgacgacctcgccgctggccacaacaagcgcaaaatcattcagcaggctatatttcaagagctttgcaaaatgttggatcctggcaagccttctttcactccaaagaaagggaaaacaagcgttgtcatgtttgttggtttacaaggttctggaaaaacgacaacatgtacaaagtatgcatattatcatcaaaagaagggttggaaaccagctttagtgtgtgccgatacatttagagctggtgcttttgaccagctgaagcaaaatgctaccaaagcaaagattcccttctatgggagctacatggagtcagatcctgtgaaaattgcagtggaaggtgtggaaagattcaagaaggaaaattgtgatcttataattgtagatactagtgggcgccacaaacaggaggctgctctctttgaagaaatgcgtcaagtttccgaagcaacgagaccagatcttgttatatttgttatggatagcagcattggtcaagctgcatttgatcaagctcaagcattcaggcaaagtgttgcagttggagctgtgataattactaaaatggatggtcatgcaaagggaggtggagctcttagtgctgttgctgcgacaaagagtcctgtcatatttattggaactggagagcatatggatgagtttgaagtttttgatgttaaaccatttgtcagccgcctattaggaatgggtgactggtctggtttcatggacaaaattcatgaagttgttcctatggatcagcagccagagcttctgcaaaagctttcagaagggaactttaccttaagaatcatgtatgagcaatttcagaacatacttaaaatgggtcctattggtcaggtattttcaatgcttccaggatttagtgcagagttaatgccaaaaggtcgagaaaaggaaagccaggcaaagatcaagcgctacatgaccatgatggactcaatgacaaatgaagagttggacacttcgaacccaaaactcatgaatgaatcgagaataatgcggatagcccgaggatctggacgtcaagttagagaagtaatggagatgttggaagagtacaagcgtcttgccaagatctggagcaagatgaaggggcttaagattccaaagaaaggagaaatgagtgccctatcccgaaatatgaatgcacaacacatgagcaaaatcattccccaacaaatgctgaagcagattggtggcatgggcgctttacaaaacttgatgaaacaagtgggaaacaacaaagatatgttgggaatgtttggaggcggggacaagtagaccattgctatactccaatggccggttgaaatttaggatgcgttgctgatcacaacagaaaagcattctggcaggaacgaaatcccacccaaactcaggtcaatactactaactgttctgctggagacttgtttgtcgagggaccaacccgctgaatatatatcatttcttaagaaatcctgtgatattttaagttagcagctgaagtttaagttttgtatttattagtacaagggaaaaaaaatgcaggagagtccataagaattgaaatgatttgaaaatcttttgttttgggcacgttggctggggtttggaattgttacatcaatttatgaaatgtagaactatgtttctctttacggattgcaatggatttaatatcacatgccgcttaaaataatgatagaatatcttgagcattcct

SEQ ID NO: 4548 - DNA, 1473 bp, Populus trichocarpa
atggtgttggcagagttaggggggagtatatcccgagcaatccagcagatgagcaatgctacaatcatcgacgagaaagcattaaacgattgcttgaacgagatcactcgcgctcttcttcaatccgatgttcaattcaagcttgttcgtgatatgcaaaccaatatcaagaaaatcgtcaatcttgacgatctcgccgccggtcacaacaagcgcaaaatcatccagcaagcaatattcaacgagctgtgcaaaatgttggacccaggaaagccatcttttactccaaagaaaggaaaaactagtgttgttatgtttgttggtttacaagggtcggggaaaacaacaacatgtacgaaatatgcgtattatcaccagaagaaagggtggaaaccagcgctagtttgcgctgatactttcagagctggtgcttttgatcagctgaaacagaatgctactaaagctaagattccattctatggaagctatatggaatcggatcctgttaaaattgctgtggaaggtgtggagagattcaagaaggaaaattgtgatcttataattgttgacactagtgggcggcataaacaggaagttgcgctttttgaagaaatgcgacaagttgctgaagcaacgaaaccggatcttgttatatttgtcatggatagtagtattggtcaagctgcatttgatcaggctcaagcatttaagcaaagtgttgcagttggagctgtgattgttaccaaaatggatggtcatgctaagggtggtggtgcacttagtgctgttgcagcaacaaagagtcctgtcatttttattggcacaggagagcatatggatgagtttgaagtcttcgatgttaaaccttttgttagtcggcttttaggtatgggtgattggtctggtttcatggacaaaatccatgaggttgttcctatggatcaacaaccagagcttctgcaaaaactttctgaagggaactttaccttgaggattatgtatgaacaattccagaatctactaaaaatgggtcccattgggcaggtgttttcaatgcttcctggatttagttctgaattaatgccaaaaggtcgtgaaaaggaaagccaggcaaagattaagcgctatatgaccatgatggattcaatgactaatgaaggcaattcaaatccaaagcttatgaatgagtcacgtattatgaggatagcacggggttcaggccgttcagttagagatgtaatggaaatgttggaagagtacaaacgacttgctaagatctggagcaaaatgaagggacttaagattccaaagaagggtgaaatgagtgccctttctagaaacatgaatgcacaacacatgagcaaagttctcccaccacagatgttgaagcagattggtggtatgggtggcttgcaaaatttgatgaagcaaatgggttctgccaaggacatgatgggcatgtttggaggtggg

SEQ ID NO: 4549 - DNA, 1872 bp, Populus trichocarpa
gaatttcattaatatattactgtaaaaactcgtcttttcattaagacagaaaaaaaaacccaaacaaattcactctttccatccatccctcttgcttcctctgaaattcaccaaagagaaaccctaatctccaaaatcatcccatccgtctcctccaataaaaaaaattgaacctgtggaactgaaaaaagaaagcaaaaatggtgttggcgcagttaggagggagcatatcccgagcaatccagcaaatgagcaatgcaacaatcatcgacgagaaagcattaaacgactgcttgaacgagatcactcgcgcgcttcttcaatccgatgtccaattcaagcttgttcgcgacatgcaaactaatatcaagaaaatcgtcaatctcgacgatctcgctgccggtcacaacaagcgcagaatcatccaacaagcgatatttaacgagctctgcaagattttggacccagggaagtcctcatttaccccaaagaaggggaaaactagtgttgttatgtttgtaggtttacaagggtctggaaaaacgacgacgtgtacaaaatacgcttattatcatcagaaaaaaggatggaaacccgccctcgtttgcgctgatacgtttagagctggtgcatttgatcagttaaagcagaatgcaactaaagctaaaattccattttatggaagctatacggaatcggatcctgtaaaaatagctgaggaaggtgtagaaacatttaagaaggaaaattgtgatcttataattgttgatacaagtggacggcataaacaggaagctgcacttttggaagaaatgcgtcaagtttcagaagcaactaaaccggatcttattatatttgttatggatagcagtattggtcaagctccatttgatcaagctcaagcttttaagcaaatggttgcagttggagctgtgattattactaaaatggatggtcatgcaaagggtggtggtgcgcttagtgcagttgcagcaactaagagtcctgtcatttttattggtactggagagcatatggatgagttcgaagtctttgatgttaaaccttttgttagtcgccttttaggcatgggtgactggtctggattcatggacaaaattcatgaggttgttcccatggatcaacagcccgagcttctacaaaagctgtcagaagggaactttaccttaaggattatgtatgagcaattccagaatctactaaaaatgggtcccattggccaggtattttcaatgcttcctgggtttagtgctgaattaatgccaaaaggtcatgaaaaggaaagccaggctaagattaagcgatacatgaccatgatggattcaatgactaatgaagagttggatagttcaaatccaaagctcttgaatgactcacgaatgatgaggatagcacggggtgctggccgtccaattagagatgtaatggaaatgttggaagagtacaagcgacttgctaaagtctggagcaaaatgaaggggcttaagattccgaagaagggtgagatgagttccctgtctagaaacatgaatgcacagcacatgagcaaagtcctccctccacagatgctgaagcagattggtggcatgggtggtttgcaaaacttaatgaagcaaatgggatcagctaaagacatgatgggcatgtttggaggcggggacaagtaaacgtgtgattgccaacaactacatgaaatgaattcccatgacaataacctaggtctgtcaggaggatggtaagctgcgtggagtgtttaatatatgcaagtcgatgcttcaacaaaactttgtggatacttgttcttaaaggatcaatgcatttgattcaattctcggaaaaaaaaaaaaaaaa

SEQ ID NO: 4550 - DNA, 1816 bp, Sorghum bicolor
acaaccacgccgcccaaaccgacaccgtctccagcgccggccgccgctacactctcatctgacccatggacgcgacgcaactgaaccggccaatggacgcgacgcgactcttccttggcgcgctcctcctcctcctccccgccgcgctcctcctcctgctccgcgcgcggggcaggcgccgcctcccaccgggcccgccgtcgctgccgctgctcggcagcgtggtgtggctcaccaactcgcccaccgagatcgagcccctgctgcggcgcctcttcgagcggtacggccccgtcgtggcgctccgcatcggggcgcgcctcttcgtcttcgtcgccgaccgccgcatcgcgcacgaggcgctcgtcgaccgcggcgcggcgctggcggaccgcccggcgctcgcgtcggtcaggctcctcggcgagaacgaaaacagcatcacccgcgccagctacgggcccgtgtggcgcctccttcgccgcaacctcgtcgccgagacgctgcacccgtcgcgggtgaagctcttcacgccggcgcgcgcgtgggtgcgacgcgtgctcgtcgagaagctcggcgagcccgggcccgacgccgcgccgccccgcgtcgtggagacgttccagtacgccatgttctgcctcctcgtgctcatgtgcttcggcgagcgcctcgacgagcccgccgtgcgcgccatcgcttctgcgcagcgggagggactcatctaccgctccaagaacatgcaagtcttctccttcttgccggccgtcaccaagcacctcttccgcgctcggctcgataaagcacgggagctgcggcggcgcgtcaaggagctcttcgttccgctcatcaacgcgcgccgggagtacaagaagcggggaggcgagccgaaaggggaaaccacgttcgagcactcgtacctggacacgctgctcgacatcaagcttcacgaggacggcgatcgcccgctcaccgacgatgagatttgcatcctatgttccgagttcctcgacgccggtacggacaccacgtccacagggctgcagtggatcatggcagagcttgtcaaaaacccagccatccaggagaagctctacaacgaggtaaaggctgccgccgacaacgacaaggaaggggtctcagaggaggacgtccacaagatgccatacctcaaggcggtgatcctcgaggccctccggaagcacccgccggcccacttcgtgctgccgcacaaggcggcggaggacatggaaatcggcgggtacctgatccccaagggcacgacggtgaacttcatggtggccgagatgagccgggacgagcaggaatggaagaacccgatggagttctctccggagaggttccttcccggcggcgacggcgagggcgtggacgtgacgggcaccaaggcgatcaggatgatgccgttcggcgtgggccggaggatctgcgccgggcttggcatcgccatgctgcacctggagtacttcgttgccaacatggtgctagagtacgagtggaaggaggtgcccggcaatgaggtggacttcgccgagaagaacgagttcactgtcgtcatgaagaagccgctacgcccacgccttgtccctaggaggtctcacttgaactagaactattttactgttctattgtatggtttcttgtattgtgatgaaactgttttactgttctattgtatggtttcttgttatgtgatgtatataaacatcagtgtactattcataactggcaaaaattctggttcttcaataattattcggcagagaatgtaaccttcattggatagtttcgtctt

SEQ ID NO: 4551 - DNA, 1654 bp, Zea mays
cactggtcaccggtacactctgatccgaacaatggacgcgacgcaactgaaccgatcgatggacgccacgccgacgcggctcttccttggcgcgctcctcttcctcgtccccgccgcgctcctcctcctgctccgcgcgcggggcaggcgccgcctccccccgggcccgccgtccctgccgctgctcggcagcgtggtgtggctcaccaactcgcccgccgagatcgagcccctgctgcggcgcctcttcgagcgttacggccccgtcgtggcgctccgcgtcggggcgcgcttgtccgtcttcgtcgcggaccgccgcatcgcgcacgaggcgctcgttgaccgcggcgcgacgctggcggaccgcccggcgctcgcgtcggtcaagttcctcgacgagagcgacaacaccatcacccgcgccagctacgggcccgtgtggcgcctgctgcgccgcaatctcgtcgccgagacgctgcacccgtcgcgggtgaagctcttcgcgccggcccgtgcatgggtgcgccgcgtgctcgtcgagaagctcggggaggccgggcccgacgccgcgccgccccgcgtagtggagacgttccagtacgcgataaactgcctcctcgtgctcatgtgcttcggcgagcgccttgacgagcccgccgtgcgcgcgatcgcttctgcgcagcgggaggcactcatctaccgctccaagaacatgcaggtcttcgccttcctccctgccgtcaccaagcacctcttccgcgctcggctagataaagcgcgggcgctgcggcggcgcgtcaaggagctcttcgttccgcttatcaacgcgcgccgggagtacaagaagcggggagaggaaccgagaagggaaaccacgttcgagcactcgtacgtggacacgctgctcgacatcaagcttcacgaggacggcgatcgcccgctcaccgacgatgagattatcctcctatgctccgagttcctcgacgccggtacggacaccacgtccacagggctgcagtggatcatggccgagcttgtgaaaaacccagccatccaggagaagctctacagcgagatcaaggccgccacagacgacaacaaggaaggggtgtcagaggaggacgtccacagtatgccatacctcaaggcggtgatcctcgagggtctccggaagcacccgccggcccacttcgtgctgccgcacaaggcggcggaggaaatggagatcggcgggtacctgatccccaagggcacagttgtgaacttcatggtggccgagatgggccgggacgagcaggagtggaagaacccgatgcagttctcgccagagcggttcctccccggcggcgatggcgagggcgtggacgtgacgggcaccaaggcgatcaggatgatgccattcggcgtgggccggaggatctgcgcggggcttggtatcgccatgctgcacctggagtacttcgttgccaacatggtgcgggagtacgagtggaaggaggtgcccggcgacgaggtagacttcgctgagaagaacgagttcactgtcgtcatgaagaagccgctgcgcccgcgccttgtgcctaggaggtctcacttgaactagaaatactttaccattttctattctacattttcctcgttttgtgatgtatgt

SEQ ID NO: 4552 - DNA, 1760 bp, Zea mays
aacaccaagccacagccactggccaccggtacactctgatccgaacaatggacgcgacgcaactgaaccgatcgatggacgcgacgccgacgcggctcttccttggcgcgctcctcctcctcgtccccgccgcgctcctcctcctgctccgcgcgcggggcaggcgccgcctccccccgggcccgccgtccctgccgctgctcggcagcgtggtgtggctcaccaacttgcccgccgagatcgagcccctgctgcggcgcctcttcgagcgttacggccccgtcgtggcgctccgcgtcggggcgcgcttgtccgtcttcgtcgcggaccgccgcatcgcgcacgaggcgctcgttgaccgcggcgcgacgctggcggaccgcccggcgctcgcgtcggtcaagttcctcgacgagagcgacaacaccatcacccgcgccagctacgggcccgtgtggcgcctgctgcgccgcaacctcgtcgccgagacgctgcacccgtcgcgggtgaagctcttcgcgccggcccgtgcatgggtgcgccgcgtgctcgtcgagaagctcggggaggccgggcccgacgccgcgccgccccgcgtagtggagacgttccagtacgcgatgttctgcctcctcgtgctcatgtgcttcggcgagcgccttgacgagcccgccgtgcgcgcgatcgcttctgcgcagcgggaggcactcatctaccgctccaagaacatgcaggtcttcgccttcctccctgtcgtcaccaagcacctcttccgcgctcggctcgaaaaagcgcgggcgctgcggcggcgcgtcaaggagctcttcgttccgcttatcaacgcgcgccgggagtacaagaagcggggaggggaaccgagaggggaaaccacgttcgagcactcgtacgtggacacgctgctcgacatcaagcttcacgaggacggcgatcgcccgctcaccgacgatgagattatcctcctatgctccgagttcctcgacgccggtacggacaccacgtccacagggctgcagtggatcatggccgagcttgtgaaaaacccagccatccaggagaagctctacagcgagatcaaggccgccacagacgacaaggaaggggtgtcagaggaggacgtccacaagatgccatacctcaaggcggtgatcctcgagggtctccggaagcacccgccggcccacttcgtgctgccgcacaaggcggcggaggaaatggagatcggcgggtacctgatccccaagggcacagttgtgaacttcatggtggccgagatgggccgggacgagcaggagtggaagaacccgatgcagttctcgccagagcggttcctccccggcggcgatggcgagggcgtggacgtgacgggcaccaaggcgatcaggatgatgccattcggcgtgggccggaggatctgcgcggggcttggcatcgccatgctgcacctggagtacttcgttgccaacatggtgcgggagtacgagtggaaggaggtgcccggcgacgaggtggacttcgccgagaagaacgagttcactgtcgtcatgaagaagccgctgcgcccgcgccttgtgcctaggaggtctcacttgaactagaaatactttacgtaccattttctatcctacgttttcctcgttttgtgatgtatataaacatctcatagctataaaaaaaattacggttctacaataaaaaaaaaaaaaaaaaaaaaaaaaaaaaaaagaaaaaaaaaaaaaaaa

SEQ ID NO: 4553 - DNA, 1689 bp, Sorghum bicolor
cacaacaagccacccgttccagcgccggccggccgcccgccggtacactctgatccgacccaatggacgcgacgcgactcttccttggcgcgctcctcctcctcctccccgccgcattcctcctcctgctccgcgcgcggggcaggcgccgcctccccccgggcccgccgtcgctgccgctgctcggcagcgtggtgtggctcaccaactcgcccgccgagaccgagcccctgctgcggcgcctcttcgagcgttacggccccgtcgtggcgctccgcatcggggcgcggctctccgtcttcgtcgccgaccgccgcatcgcgcacgaggcgctcgtcgaccgtggcgcagcgctggcggaccgcccggcgttcccggagggcaggttcctcggcgaggacgacaacatcatcacccgcgccagctacggtcccgtgtggcgcctcctgcgccgcaacctcgtcgccgagacgctgcacccgtcgcgggtgaggctcttcgcgccggcgcgcgcgtgggcgcgccgcgtgctcgtccacaagctcggcgagcccgggcccgacgccgcgcctcctcgcgtcgtggacacgttccagtacgctatgtttttcctcctcgtgctcatgtgcttcggcgagcgcctggacgagcccgcggtgcacgcgatcgcttccgcgctgcgggagccactcatctaccgctccaagaacatgcaagtcttcagcttcttgccggccgtcaccaagcacctcttccgcgcgcggctcgacaaagcgctggcgatgcggcggcgcatcaaggagctctttctcccgctcatcgacgcgcgccgggagtacaagaagcggccgggaggcgagccgccgaaaggggaaaccacgctcgagcactcgtacgtggacaccctgctcgacatgaagattgaagaggacggcgcccaacgcccgctcaccgacgatgagattatccgcctatgctccgagttcctcaacgccggcacggacaccacgtccacagggctgcagtggatcatggccgagcttgtcaaaaacccagccatccaggagaagctctacaacgagatcatggccgccaccgacgaagacaagcaggaaggggtcgcagaggaggacgtccacaagatgccatacctcaaggcggtgatcctcgaggccctccggaagcacccgccggcccacttcgtgctgccgcacaaggcggcggaggacatggaaatcggcgggtacctgatccccaagggcacgacggtgaacttcatggtggccgagatgagccgggacgagcaggaatggaagaacccgatggagttctcgccggagcggttcctccccggcggcgacggcgagggcgtggacgtgacgggcaccaaggcgatcaggatgatgccgttcggcgtgggccgtagaatctgcccggggcttggcatcgccatgctgcacctggagtacttcgttgccaacatggtgcgggagtacgagtggaaggaggtgcccggcgacgaggtggacttcgccgagaaaaatgagttcactgtcgtcatgaagaagcccctacgcccgcgccttgtgcctaggaggtctcacttgaagtcttgaactagaactactttactatactatgggaattgttattctccatgcacctaaaattaatggttgtttttggtcg

SEQ ID NO: 4554 - DNA, 2096 bp, Hordeum vulgare subsp. vulgare
ggtcatctcactcctccgcatccattccagcgagcagagagcggaagagcagagcaccacacgctcgccatggacacgtggcgcatcttcctcggctcggccctcctcgcgataccgctgatccttctcctccgcggccgcaagggcggccggctccgcgtcccgccgggcccgccgtccctgccggtgctgggcagcgtggtgtggctgaccaactcgcccgccgacgtggagcccctgctccggcgcctcttctcgcggtacggccccatcgtgtccctgcgcgtggggtcccgcctctccatcttcgtcgccgaccgccgcctcgcccacgcggcgctcgtcgagcgcggcgccacgctcgcggaccgccccgccctcccttcgctcaagctgctcggcgagaacaacaacaccatcacgcgcgccagctacgggcccgtctggcgcctcctccgccgcaacctcgtctccgagacgctgcacccgtcgcgggtccgcctcttcgcgcccgcgcgctcctgggtgcgccgcgtgctggccgagaagctccgggatgagtcgtcatctggcggcgcggccgtcgtggagacgttccagtacgccatgttctgcctcctcgtgctcatgtgcttcggtgagcggctcgacgaggccacggtccgcgctatcgctgccgcccagcgcgagccgctcatctacaggtcgaggaagatggccgtcttctccttcctgccttcggtgaccaagcacctctaccgcgaccgcctccagaccgtgcacgccatgcagcggcggaagaaggacctgttcgtgccgctgatcaacgctcggcgggagtacaggaaactcggcggcgagcccaagaaagagagcacattcgagcactcctacgtcgacgccctgctcgacataaagctccccgaggagggaaaccgcccgctcaccgacaacgagatgatcaatctctgttcagagttcctcgacgccgggaccgacaccacctccaccggcttgcagtggatcatggccgagctggtgaagaacccggccatccaggagaagctctacaaggaaatcagcgccacgaagggggacgacaaggaagaggtctccgaggaggacgtccacaagatgccgtacctaaaggcggtggtcctcgaaggcctccggaagcacccaccggcgcacttcgtgctgccgcacaaggcggcggaggacatggaggtcggcgggtacctgattcccaagggcgcgacggtgaacttcatggtggccgagatgagcagggacgagcgggagtgggagaagccaacggagttcgtgccggagcggttcctgccaggtggcgccggcgaagcggtggacgtgaccggcaatcgggagatcaagatgatgccgttcggcgtgggccgtaggatctgcgccgggctcggcatcgccatgctccacctggagtacttcgtggccaacatggtaagggagttcgagtggcaggaggtccccggcgaggaggtggacttcgctgagaagaacgagttcaccgtcgtcatgaagaagccgctgcgcccacgccttgtgccccggagccagtagtcaaattcggccagtagtccactctacctatcgtttcgatcgttgttgtttagtttactgcatgttgataatgcttattaattcgttgatgtaagatggaaaattactagtgccgctttcgagaaatcgaggtgtttaaattactagtagtgcttgtgctgcgtgtttcttcgttggatattcgaggagtttcctggagcaagcaagagcacagctttcctgcctggttgaatttcccgtggtcctgatggagcttgttgacacggatgcgcgcgagctcggaaagcgtgacaccagtggatgagacaggaagcacgatgagcctccgagaaacagaggatggcggggcagggatatttcgggatcattttgtgcttctgttgatgacaagtactagtagtttacgttactcctagggcaagcgaagatagatgtatccgttcaagataactttgtttctgccagcatgtccaccttttgtgatacttttctttgacaac

SEQ ID NO: 4555 - DNA, 1899 bp, Oryza sativa Japonica Group
acggtacgcggtgctcgcgctcactcgaagatggacacgtggcacgtcgccgtcgccgcaatcctcgtcctcatccccttcctccggctcatcctctcccgccgcggcggccgcggcggcgggaagcgcggccgcctcccgccgggtcctccggccgtgccgttgctcgggagcacggtgtggctgaccaattcgctggccgacgccgagcccctcctccggcgcctgatcgcgcggcacggccccgtcgtctccctccgcgtcgcgtcccggctgctcgtcttcgtcgccgaccgccgcctcgcgcacgcggcgctcgtcgagaagggggcgtccctggccgatcgccccgccatggcgtcgacgaggctgctcggcgagagcgacaacctcatctcgcgggccagctacgggcccgtgtggcgcctcctgcggcgcaacctcgtcgccgagacgctgcacccgtcgcgcgtgcggctgttcgcgccggcgcgcgcgtgggtgcggcgcgtgctcgtcgagaagctgcgggacgagaacggcgacgcggcggcgccacacgccgtcgtggagacgttccagtacgccatgttctgcctcctggtgctcatgtgcttcggcgagcggctcgacgaggacgcggtgcgcgcgatcgccgtcgcgcagcgggacgcgctcctctacctgtcgagcaagatgcccgtcttcgccttcttcccggcggtcaccaagcacctcttccgcgggcgcctccagaaggcgcacgccctccgccggcggcagacggagctgttcgtgccgctgatcaacgcgcggcgggagtacaagaaacggcagggcggcgccaacggcgagccgaagaaggagaccacgttcgagcactcgtacgtcgacaccctcctcgacatcaagctccccgacgacggcaaccgcccgctcaccgacgacgagatggtcaacctctgctccgagttcctcaacgccggcaccgacacgacgtccaccgcgctgcagtggatcatggccgagctggtcaagaacccatccatccagtcaaagctccacgacgagatcatggccaagaccggcggcggcggcggcggcggccagcgcgaggtctccgaggaggacatccacgacatgccgtacctgaaggcggtggtgctcgagggcctccggaagcacccaccggggcacatggtgctccctcacagggcggcggaggacatggagatcggcgggtacctcatccccaagggcaccacggtgaacttcatggtggcggagatgggaagggacgagaaagaatgggagaagccaatggagttcatgccggagcggttcctcgccggcggcgacggcgagggggtcgacgtcacaggcagcagggagatccggatgatgccgttcggcgttgggcggaggatttgcgccgggctcggcgtcgccatgctacatgtcgagtacttcgtggcgaacatggtgagcgagttcgagtggaaggaggtcgccggcgacgaggtggacttcgccgagaagatcgagttcacaaccgtcatggcgaagccgctgcgcgctcgtctcgtgcccagaagggcctagatcaccatgtatgtatgcgttagggtcaccgtttcagtagcttagctcaatccaaatgcatgcttcttactactctagtggagttcttaattaaacactacctagtacaatacaataacctttgttctgaatgatcagtggcgatatagtgatatggatatgatgcttcttaattaattagtttctctacttagttcagtactttttacttccatgctctgaaattctgaatagagatgcatgattagtggtgaaatgtaaaaatagccggtgtaattaaggtgttcctattgaccg

SEQ ID NO: 4556 - DNA, 1645 bp, Hordeum vulgare subsp. vulgare
gatggacacatggcaactcttcttcggcgtgatcctcttcgccctcccgctgatcatcctccttttacgcaacggtaagggaggcggcggcggcggccggcggcccatcccgcctggcccgccatcctttccgttgctgggcagtatggtgtggctgacgaactcacccgccgacggggagctcctcctccggcgtctgttcgcgcggcacggtcccatcgtgtcgctgcgcgtgggctcccggctctccatcttcgtcgccgaccgccgcctcgcgcacgcggcgctcgtcgagcgcggtgccgctctggccgaccgcccgaccctcgcgtccgtcacgctcctgggcgagaacgacaacaccatcacgcgcgccagctacgggcccgtgtggcgcctcctccgccgcaacctcgtctccgagacgctgcacccgtcccgcgtccgactcttcgcgcccgcgcgctcctgggtgcgccgcgtgctcctagacaagctgcaggacgagtcgtcctccggcggggcggccgtcgtcgagacgttccagtacgccatgttctgcctcctcgtgctcatgtgcttcggcgagcggctcgacgagcccgcggtgcgcgcgatcgccgccgcgcagcgcgaccagctgctctacatcacccggaaaatgaccgtcttcgccttcttcccgtcgctcacaaagcacgtcttccgcgaccgcctccgcaccgcgcacgccatgcggcggcggcagaaggagctgttcgtaccgctgatcaacgcgcggcgggactacaagagccgcggcgacgagcccaggaaagagacgacattccagcactcgtacgtggacaccttgctcgacatcaagctgcccgaggagtgcgaccgcccgctcaccgacagcgagatggtcatactctgctccgagtttctcaacgccgggaccgacaccacctccactgggctgcagtggatcatggccgaactggtcaagaacccagaaatccagaagaagctccacgacgagatcaaagccacgacgggggacgacgaccatgaagaggtctccggggacgacgtccacaagatgccctacctcaaggcggtggttcttgaaggcctccggaagcacccgccggggcacttcgtgttgccgcacaaggcggcggaggacatggagatcggcgattacctgatacccaagggcgccacggtgaacttcatggtcgccgagatgggccgggacgagcgggagtgggaaaggccgttagagttctctccggagcggttcctgccaggcggcgcgggcgaagggatggacgtgacgggcaaccgagagatcaagatgatgccgttcggcgtgggccgtaggatctgcgccgggctcggcatcgccatgctccacctggagtacttcgtggccaatatggtaaaggagttcgagtggcaggaggtcgccggcgaggaggtggacttcgccgagaagaacgagttcaccgtcgtcatgaagaagccgctgcgttcacgcctcgtgccccgtaccagtaggtcttagaataaaccaacttcagcaactggcagccatatcggttcgatccattattctcgctttcgttcatttttaataagtgaaaattttgtttttgcc

SEQ ID NO: 4557 - DNA, 1648 bp, Hordeum vulgare subsp. vulgare
ggtcatctcactcctccgcatccattccagcgagcagagagcggaagagcagagcaccacacgctcgccatggacacgtggcgcatcttcctcggctcggccctcctcgcgataccgctgatccttctcctccgcggccgcaagggcggccggctccgcgtcccgccgggcccgccgtccctgccggtgctgggcagcgtggtgtggctgaccaactcgcccgccgacgtggagcccctgctccggcgcctcttctcgcggtacggccccatcgtgtccctgcgcgtggggtcccgcctctccatcttcgtcgccgaccgccgcctcgcccacgcggcgctcgtcgagcgcggcgccacgctcgcggaccgccccgccctcccttcgctcaagctgctcggcgagaacaacaacaccatcacgcgcgccagctacgggcccgtctggcgcctcctccgccgcaacctcgtctccgagacgctgcacccgtcgcgggtccgcctcttcgcgcccgcgcgctcctgggtgcgccgcgtgctggccgagaagctccgggatgagtcgtcatctggcggcgcggccgtcgtggagacgttccagtacgccatgttctgcctcctcgcgctcatctacaggtcgaggaagatggccgtcttctccttcctgccttcggtgaccaagcacctctaccgcgaccgcctccagaccgtgcacgccatgcagcggcggaagaaggacctgttcgtgccgctgatcaacgctcggcgggagtacaggaaactcggcggcgagcccaagaaagagagcacattcgagcactcctacgtcgacgccctgctcgacataaagctccccgaggagggaaaccgcccgctcaccgacaacgagatgatcaatctctgttcagagttcctcgacgccgggaccgacaccacctccaccggcttgcagtggatcatggccgagctggtgaagaacccggccatccaggagaagctctacaaggaaatcagcgccacgaagggggacgacaaggaagaggtctccgaggaggacgtccacaagatgccgtacctaaaggcggtggtcctcgaaggcctccggaagcacccaccggcgcacttcgtgctgccgcacaaggcggcggaggacatggaggtcggcgggtacctgattcccaagggcgcgacggtgaacttcatggtggccgagatgagcagggacgagcgggagtgggagaagccaacggagttcgtgccggagcggttcctgccaggtggcgccggcgaagcggtggacgtgaccggcaatcgggagatcaagatgatgccgttcggcgtgggccgtaggatctgcgccgggctcggcatcgccatgctccacctggagtacttcgtggccaacatggtaagggagttcgagtggcaggaggtccccggcgaggaggtggacttcgctgagaagaacgagttcaccgtcgtcatgaagaagccgctgcgcccacgccttgtgccccggagccagtagtcaaattcggccagtagtccactctacctatcgtttcgatcgttgttgtttagtttactgcatgttgataatgcttattaattcgttgatgtaagatggaaaattactagtgccgctttcg

SEQ ID NO: 4558 - DNA, 1685 bp, Sorghum bicolor
atggaccccaatggcctcaaaactggaggccttttgctcccgaccattgagaggcggtgcacgtctcctccatccgtcattgtcatcggtggtggcatctctggcgttgcagctgcccgtgccctctccaattcttcatttaaggtgactgttttggagtcgagagatcgtattggcgggcgtgttcatactgattactcatttggatgcccaattgatatgggagcctcatggctgcatggcgtgtgtaatgagaattcattggcgccattgattggctatcttgggctgaggttatatcgcacaagcgatgacaactcagttctgtatgatcatgatttagaaagctatgctctctttgataaggatggtaatcaggtcccaaaggagacagtcgataaagttggagaaacttttgagagaattcttgaagagacggtgaaagtgcgtgatgagcaggaacatgacatgccacttctacaggcgatttctattgtgtttgagaggcacccccatctaaagctagaagggctagatgatcaggtcttgcaatggtgtgtctgccggcttgaggcatggtttgctgcagatgcagatgaaatatctctgaagaactgggatcaggagcgtgttcttactggtggacatggactaatggtgaatggatactatcctgttattgaagctcttgctcaaggtcttgacatcaggcttaaccaaagggttaccgaaattacccgccaatacaatggagtcaaggtcactactgaagatggcacaagctacttcgctgacgcttgcataatctccgtgccacttggtgtgctcaaggcgaacgtaataaaatttgaacctgagctgccctcatggaagagctctgccattgcggacctcggcgtcggcgtcgagaacaagatcgctatgcactttgacagagtcttctggcccaacgttgaggtgctgggaatggttgggccgacgcctaaagcctgtgggtacttcctgaacctgcacaaagcgaccggcaatccggtcctcgtctacatggctgccggaaggtttgcccaggaagtggagaaattgtcggataaggaagccgtcagcttggtcgtttctcacctgaagaagatgcttccagatgcctctgaaccaacgcagtacctggtgtcacgctggggctccgacccgaactctctggggtcctactcctgcgacctggtcggaaagccggccgacgtgtgcgcgaggttctccgcccccgtggataacctgtacttcgccggcgaggcggccagcgccgagcactcggggtcggtgcacggcgcctactcgtcgggcattgccgcagccgaagaatgcaggaagcgcctactgacgctgaagggcatcccggacctggtccaggtcgcggcatgggaggagatggccggagctgtggctcccctgcagatttgcaggacctgactacctgagtgagctggatcagtgattcagtggctgccttggagtggtttgatgacgttgttgctgcttcctgacgatcgcgaaagtcctttatattgtgtaataatgttattatcttgaacgtgtgtattgtctggaataagtcaagatcgactgatactgaacttattacgttactccttcaaatacttaataataaattatgagtccttaattcaaag

SEQ ID NO: 4559 - DNA, 2041 bp, Zea mays
ggccagagagaaatatctcatcttctctccaccggatcggttcaatcgagagcgagggagaaagggaggtggtgcgtcgaggggggccgagattttgccggtttggagccagataggggtatgagctgcttcgcgcaccgccgccgctccgacgtcgcccgccgccaggacggcctcctcgtcttcgtcttcttcctctcgattcccatacgtaccagtagttttaatttaagtagtagtaattgtagtagcaatctcttgtaaactgcgctcgcctttgcgtgttcgtggtccttttgcgctttctcgtccctctttctctcaatctctccttattcttctccttccacggcgaagccggcggctggtatggatcccaatggcctcaaaactggaggccttttgctcccgaccatcgagaggcggtgcacgtcgcctccatccgtcattgtcatcggcggtggcatctcgggcgttgcagctgcccgtgccctctccaattcttcatttaaggtgactgttttggaatcgagagatcgtattggcgggcgcattcatactgataactcgtttggatgcccaattgatatgggagcctcatggctacacggcgtgtgcaatgagaatccactggcaccattgataagctatcttgggctgaggttataccgcacaagcgatgataactcagttctgtatgatcatgatttagaaagctatgctctctttgataaggatggtaatcaggtcccaaaggagacagtcgataaagttggagaaacattcgagagaattcttgaagagacggtgaaagtgcgcgatgagcaggaacacgacatgccactgctacaggcaatttctattgtgtttgagaggcacccccatctaaagcttgaagggctagatgatcaggtcttacaatggtgtgtctgccggcttgaggcatggtttgctgcagatgcagatgaaatatctctgaagaactgggatcaggagcgtgttcttactggtggacatggactgatggtaaatgggtactatcctgttattgaagctcttgctcaaggtcttgacatcaggcttaaccaaagggtcaccgaaattacccgccagcacaatggagtcaaggtcactactgaagatggcacaagctacttggccgacgcctgcataatctcagtgccactcggcgtgctcaaggcgaacgtaataaagttcgagcctgagctgccccagtggaagagctccgccatcgccgacctcggcgtgggcaccgagaacaagatcgccatgcacttcgacagggtcttttggcccaacgtcgaggtgctgggaatggtcgggccgacgcccaaagcctgtgggtacttcctgaacctgcacaaagccaccggcaatccggtcctcgtgtacatggccgccggaaggttcgcccaggaggtggagaagctgtcggacaaggaagccgtcggcctggtcgtttctcacctgaagaagatgctcccggatgccactgaaccgacgcagtacctggtgtcgcgatggggctccgaccccaactccctggggtcctactcgtgcgacctggtcgcgaagccggccgacgtgtgcgcgaggttcgccgcccccgtcgagaacctgcacttcgccggcgaggcggccagtgccgagcactcggggtccgtgcacggcgcctactcgtcgggcatcgccgctgccgaggaatgcaggaagcggctcctggcgctgaagggcatcccggacctggtccaggtcgcggcgtgggaggagatggccggagctgtggctcctctgcagatttgcaggacctgagtgagattggatcactggctgcctttggacattggagtggatcgtggatcgcttcgctgctccctgatggttgccgagtctttttttatatttaccttaccttgaaggccgttgtgtcttgtctggaataaatcaagattgactggcactgaaagtgtcatcgcgtcactctttcatacttattaataaatatcacaagtctgtcctg

SEQ ID NO: 4560 - DNA, 2062 bp, Oryza sativa Japonica Group
gaggatttggagttgaattgtggggagggggacctcgcgggtgttgccggtttggagcccaagatagggttatgagctgcttcgcggaccgccgctgctacgccgccagccgccgccaggacggcctcctcgtgttcatgttcttcatctcgattcccatacgtactagtagcagtagtagtaataattgtaattccagtagtagtattagtagtaatctcctgtaagcggagttcctcctcgcggctgcgtgtacggggacgggaggaccttcttcctcttcgtgttcatcttcttcttcttcttcctctcttccttcggcttcggcgctggcggctatggatcccaatagcctcaaaactggaggcctcttgcttccgaccattgagaggcaatgtgcttcgcctccatccgtcatcgtgatcggtgggggaatttcaggggttgcagcagcccgtgctctctccaatgcttcgtttgaggtgactgttttggagtccagagatcgcgtaggcggtcgtgtccataccgattactctttcggatgcccaattgatatgggagcctcatggctccacggcgtttgtaatgagaactccttggcaccattgattggctatcttgggctgaaattatatcgcactagtggcgacaactctgttctgtatgatcatgatttagaaagttatgcactctttgataaggctggccatcaggtctcaaaggagacagttgctaaagttgaagaaacatttgaaagaattcttgatgagacagttaaagtgcgtgatgagcaggaacatgacatgccccttctacaggcgatttcacttgttcttgagaggcacccccatctgaagttacaagggatagatgatcaagtcttgcaatggtgtgtctgtcggcttgaggcatggtttgctgcagatgctgatgaaatatctctgaaaaactgggatcaggagcatgttcttaccggtggccatggtctgatggtgaacggatactatcctataattcaggctcttgcacaaggtctagatatccggcttaatcaaagggtaaccaaaattgcccgccaattcaatggagtgacagttaccactgaagatggaacaagttactctgccgatgcttgcatcattacagtaccgctcggtgtgctcaaggcaaacataatcaagttcgagcctgagttgccctcatggaagagctctgcaatcgcagaccttggtgtcggtatcgagaacaagatcgccatgcacttcgatacagtcttctggcctaatgttgaggtgctgggaatggttggcccaacgcctaaagcatgtgggtacttcctgaacctccacaaggccaccggcaatccggtcctcgtctacatggccgccggtagatttgctcaagaagtggaaaaactgtcagacaaggaggccgttgatctggtcatgtctcacctgaagaaaatgctacctgacgccactgaacctacgaagtatttggtttcacgctggggttctgacccgaactcgctgggttcctactcgtgcgacctggtcgggaagccggccgacgtgtcggcgcggttcgccgcaccggtggagaacctctacttcgccggcgaggcggccagcgccgaccactcggggtccgtccacggcgcctactcgtcggggatcgccgccgccgatgagtgccggaagcgcatcctgatgcagaagggcatccctgacctcgtccaggtcaaggcctacgaggagatggccggagtcattgctccccttcagatttgcaggacctgaaaaaactgaacctgctccaccctgccattgtcatggaatctggattgattcaattgccatgcctatgccctggaatcttgatgattcaatcactcatacaagttcaagttcatgtaggggattaactgcatgaatcaaaattattaattaataattatgtaattgtcatgttattattgaataaataaatcgagatcatgcttgagatctttgtactgggacacagtttcaattaattaatgctagtaacaaccttggag

SEQ ID NO: 4561 - DNA, 2162 bp, Sorghum bicolor
gagaggcaggcacacagagcgatcgagcgagcccgagccgtgcccaacaaggaccacccacccacccactaccagccccgcttcctctctgtctctccaccgctcgcgcgcggcgggcggcgtggctccgagggcgggaagcgcgggctcggcggggcgactcgccggcggcgacctgcaggtttgggtatgagaggggtcacccacgcggcgcccaccggaagcgccccctgcccactccgcggacgactcgtcatggacggcctcctcatcttcgtcttctacctctcgctgcctatacgtggcggccgcgaccactcgttaatctctaattgttagccgccgcccggtcggcacgccatcggtcggcccgcacccccgaagctctgcgctctcgttcgtctcgtgtctacggtctacgcacgccgccaccaccgccagcctcacacacaggatcaggatcgatggaccagccaccgaatggattcgccgccggaggatttttcacgcacattgatgggcaaaaccgctctcccccttctgtaattgtaatcgggggagggatttcaggcatcgcagccgcacgtgctttgtccaatgcttcatttaaggtcacactcttggagtcgagggaccgagttggtggccgtgtgcacactgactattcttttggttgccccattgacatgggagcttcatggttgcatggtgtttgcaacgagaattctttggcgccattgattaggatgcttgggcttagattatatcgcacaagcggtgataactctgttctgtatgaccatgatttggaaagttatgctctatttgataagcatggtcagcaagttccccaggagatagttagcaaagttggagagacatttgagaaaattcttaaggagactgtcaaagtaagagatgaacatgcaaatgacatgcctcttattcaagccatggcaattgtgcttaacaggaatccacatatgaagttggagggcctggaatatgaggtactgcagtggtgtatatgtagactggaagcatggttcgctactgacatggacaatatatctctgaagaattgggatcaggaacatgtgcttaccggtggacatggtcttatggtgaatggctatgatcctgtcatcaaagctctagctcaaggtcttgacattcatctcaaccacagggtcacaaagatcatacaacgttataataaggttattgtttgtgtggaagatggggcaagtttcgttgcagatgctgctataataacggtccctctcggggtactaaaggcaaatatcatcaagtttgaacctgagctaccaagagaaaagctttcagcaatcgctgatcttggcgttggcatcgaaaacaagatagcccttaagttcaacactgtattttggcccaacgttgaagtgctaggtaggatcgccccaacgtcaaatgcctgtggctactttctcaaccttcacaaagccacaggaaacccagtcctggtatgcatggtagctggaagattcgcatacgagatcgagaagctgtctgatgaagaatccgtcaactttgttatgtcccagctcaggaaaatgctaccgcaggcaactgaaccggttcagtatttggtttcacgttggggcagtgacccaaactcacttggctcctactcgtgcgacctggtggggaaaccggctgacctgtatgaaagattctgtgctccggttggcaacctgttcttcgctggggaggccgcctgcattgaccactccgggtcggtgcatggagcttattcgtcaggcattgccgctgcagaggactgccgaaggcgtctgtcgacgcagctaggcatctccgacctgttccaggtcgcgaaggttgtcatgagggaggagatgaatgaagtcatggttccctttcagatatcgaggctgtaagagagaacaccaacaccgtgttgtgtagtgatgattgtgccatcctgaagctgacgcggcagacaaggttaacgcggaacaatatagctgccttcaattcacggcatatattgccttcaaaactgttgtattgtcgcatgcagtttgttgttcgacgtaactctatctaaaataatgtaagacctttgttgttggaagattctatagatgccgttgttcgtc

SEQ ID NO: 4562 - DNA, 2112 bp, Oryza sativa Japonica Group
accgcatcatcggcttccctccggctcgagccaatctctcgctgtgtctctctcgcgctctccactagcaccggctcggctcggctcgcgcggcggcggcggcggggcggcgtggcgccgagggaggggaacgccggtgtggggagggcggcggcgaggggactcgccggcgacgagctggtttgggtatgagaggggttacccatgcggcgccgaccacgagcgtcccccgccgcggctccatggacggcctcctcatcttcgtcttctacctctcgcttcctatacgtggtggccgcgaccactcgttaatctcctcctctaattgttagccgatctcgcctctcccccacactctctgatcccgctctctctctctgcttcgattcgattcgattcgatcttctccacctcgtcgccgtcgaacgcaactcggatcgggaggataatggaccagccttctaatggcttcgccgccggaggtctttttcttcgtcacattgatgggcaaaatgcctctcccccttctgtcattgtgattggtggagggatttcaggcattgcagctgctcgtgcgctgtctaatgcttcgtttaaggtcacactattagagtcacgggaccgacttggtggccgtgtgcatactgactattcttttggctgcccaattgacatgggagcatcttggttgcatggtgtatgcaatgagaattcattggcaccactgattaggttgcttggccttagattatatcgcaccagtggtgataactctgtgctatatgaccatgatctggagagctatgctctctttgataaggatggtcgtcaagttccccaggagatagtgacaaaagtcggggaaacatttgagaaaattcttaaggagacggtgaaagtaagagctgaacatgaagatgacatgcctcttattcaagccatctcaattgtgcttgacaggaatccacacctaaagcttgatggtttgcaatatgaagtactgcagtggtgcatatgtaggctggaggcatggtttgccacagatgtggataatatatctctgaaaaattgggatcaggaacatgttcttactggtggccatgggcttatggtgcatggttatgatcctgttatcaaagctctcgcgcaagatcttgatatccacctgaaccacagggttaccaaaatcatccagaggtacaacaaaactatagtatgtgttgaagatgggacaagctttgttgcagatgctgctataataactgtccctcttggtgtacttaaagcaaatatcatcaagtttgaacctgagctcccagattggaagctttcatcaatatctgatcttggtattggcattgagaacaaaatagccctccgcttcaatagtgtattttggccaaatgtagaagtgctaggcagggttgccccaacatcaaatgcctgcggttactttcttaaccttcacaaagccacagggcatccggttcttgtatgcatggtagcaggaagattcgcatatgaattcgagaagctatccgatgaagaatccgtaaactttgtcatgtctcagctcaagaaaatgctaccaggagctactgaaccggtccagtatttggtttcaaggtggggaaccgacccgaattcgcttggttcttattcctgcgaccttgttgggaagccagctgacttgtatgaaagattctgtgctccggtgggcaacctgtttttcgctggggaggccgcctgcatcgatcactctgggtccgtgcatggagcttattcttcaggcattgttgctgcagaggattgccgaaggcatctgtcgacgcagctaggcatctccgaccttttccaggttgggaagattatcatgagggaggagatgactgaagtcatggtccccttccagatatccaggctgtgaaagaagaacaaagcctgcctatttagcaccgtgtttatcctgcagctgctatggttaatattgtagctgctgctctgtagtttcctaattatctcagatcctgtaccgtttcacagtttgatcgtttatgtgtattcaaataaaaacagaataattatatatcaacagaccttgttctctgaatc

SEQ ID NO: 4563 - DNA, 4887 bp, Oryza sativa Japonica Group
ggtctttttcttcgtcacattgatgggcaaaatgcctctcccccttctgtcattgtgattggtggagggatttcaggcattgcagctgctcgtgcgctgtctaatgcttcgtttaaggtaaatgctgtcattgaaagatgaaataactatatctctgtcttctatattctattagcttattgtccaaaaataagttaatgttttgatgcttcccgggccctttttcttagatacttttacataactacaggtcacactattagagtcacgggaccgacttggtggccgtgtgcatactgactattcttttggctgcccaattgacatgggagcatcttggttagttgcatcccagaagtagctattttcgccgccttgcaacgtgtttggttttcatctcatggttttatcatgtggttcaggttgcatggtgtatgcaatgagaattcattggcaccactgattaggttgcttggccttagattatatcgcaccagtggtgataactctgtgctatatgaccatgatctggagaggttaggagttattcctaacccataagtttatcctcaacttgatgggctttcattctcttacaattgttgtttttgttcatttagctatgctctctttgataaggatggtcgtcaagttccccaggagatagtgacaaaagtcggggaaacatttgagaaaattcttaaggaggtattgtcatcgtttgcatttcatttgttatccatcaaatgcttttatgcaactcttgtgagcttactttgttaatattgcagacggtgaaagtaagagctgaacatgaagatgacatgcctcttattcaagccatctcaattgtgcttgacaggaatccacacctaaagtaagtggaatttagcattcacctatatctggaatggtggtgctttagcgacggggtgaaatgttctaatgatatgcattcactcttacaggcttgatggtttgcaatatgaagtactgcagtggtgcatatgtaggctggaggcatggtttgccacagatgtggataatatatctctgaaaaattgggatcaggtatgcaatagggggcacttttgtatttacatgcgcacatgaagaattgttgtattcacgtagagcagtggactgacctttcaaatttacaggaacatgttcttactggtggccatgggcttatggtgcatggttatgatcctgttatcaaagctctcgcgcaagatcttgatatccacctgaaccacaggtatgcagttacatatcctcatggccaagtaattcacataagttctgtttcataggtttcatagttataatcccaaatctatagtatcttatctcttaactttcctccagggttaccaaaatcatccagaggtacaacaaaactatagtatgtgttgaagatgggacaagctttgttgcagatgctgctataataactgtccctcttggtgtacttaaagcaaatatcatcaagtttgaacctgagctcccagattggaagctttcatcaatatctgatcttggtattggcattgagaacaaaatagccctccgcttcaatagtgtattttggccaaatgtagaagtgctaggcagggttgccccaacatcaaatgcctgcggttactttcttaaccttcacaaagccacagggcatccggttcttgtatgcatggtagcaggaagattcgcatatgaattcgagaagctatccgatgaagaatccgtaaactttgtcatgtctcagctcaagaaaatgctaccaggagctactgaaccggtaaatcctcaaaattcattttcagaccatgtacagttgagtactgtcaatttcagactatgaacagtagctctaacacttgtgctacacaactgcaggtccagtatttggtttcaaggtggggaaccgacccgaattcgcttggttcttattcctgcgaccttgttgggaagccagctgacttgtatgaaagattctgtgctccggtgggcaacctgtttttcgctggggaggccgcctgcatcgatcactctgggtccgtgcatggagcttattcttcaggcattgttgctgcagaggattgccgaaggcatctgtcgacgcagctaggcatctccgaccttttccaggttgggaagattatcatgagggaggagatgactgaagtcatggtccccttccagatatccaggctgtgaaagaagaacaaagcctgcctatttagcaccgtgtttatcctgcagctgctatggttaatattgtagctgctgctctgtagtttcctaattatctcagatcctgtaccgtttcacagtttgatcgtttatgtgtattcaaataaaaacagaataattatatatcaacagaccttgttctctgaatccatggatattgcttttcatttacacattcccagtcagtactgctgaatttattttagttttcagtgtttgccttgagactggagggctgtagtaaactagtaatcgtctgatcgaacttggcttgcgcccccatttgcttcattttgcatgtatatagggttgtagatgcaggctagttgcagttcaatggtcataaacagtggaggtttttctttctttactttcatacgtagatctccactaataataaaccatacagcatcctgcatattcggaaacgattccaccatcgtgtgaaccatatcaaacgcattcattccactgtaacatctgctgccacaatttgcaatgtccatcccatcctgtagcatcagacttgtaaattgtaatagccacaaacagagaatacattaattccctcccccaccacctaaaaatcattttttttctttcaaaaatacatatttcattaaaaaatctattatttattttcattgtattttgttttatcataaaatgcattttaccatgatttgtattttacatatttacacaaaatatttaagacgaatattcaaacatatatgtctaaaagtcaacaaccacatattaaaaaacggactcaatactacctcctttttaaatagatgacgtcgttgagttttgaatacacgtttgactaatcgtattattaaaaaatacgtaattatcatttaccatattttttagttgttttatcattaaaattacttaaagcattatttatatgttacgtatttgcacaattttttaacaagacgatactcaaacgtaacgttatctattaaaatacaaagggagtatatatattatctgtgttctagtagttcctcttgtaaaaggaagaaaagataaaaacaaactggtgccgacgccaactatttccaccgcatttgggcccacatgtccgggagccaaacgcggctacgcgacccaaacgcaaacgcaaaggcggaagctgggatcccgtgtcgtcgccgactccgactcctcctcctccgctccatataagactcgccccaaccccctcatcaacttcataccaaaccgaaccgaaggaccccacccaaaatcacacgcgccaaccagatcaaacccacctcgcaggagaagagaagcgatctacctctcctcgaggtggtggtgaggatttggagttgaattgtggggagggggacctcgcgggtgttgccggtttggagcccaagatagggttatgagctgcttcgcggaccgccgctgctacgccgccagccgccgccaggacggcctcctcgtgttcatgttcttcatctcgattcccatacgtactagtagcagtagtagtaataattgtaattccagtagtagtattagtagtaatctcctgtaagcggagttcctcctcgcggctgcgtgtacggggacgggaggaccttcttcctcttcgtgttcatcttcttcttcttcttcctctcttccttcggcttcggcgctggcggctatggatcccaatagcctcaaaactggaggtatgaattattcccacttttttgtaatttttttttctgaaattttatctggtaggagtacttggtagtggtgcgtcgtgaaaggtgggaatatttcccattgatcatagtatttttagaaatctatctattgtactttagaattaaattttccacatagggaaggtgatcatcacactttagattttacaagattattagaatttataattctagttgggtacaaattggttagttagttggtaacttgggtatctacagtattatgtagattagtgagcttgatgttcaacgtgatttctctctcttatgattcacatacctgacagtaaaaaacattttttgttcaggcctcttgcttccgaccattgagaggcaatgtgcttcgcctccatccgtcatcgtgatcggtgggggaatttcaggggttgcagcagcccgtgctctctccaatgcttcgtttgaggtgactgttttggagtccagagatcgcgtaggcggtcgtgtccataccgattactctttcggatgcccaattgatatgggagcctcatggtcagtctcaccctgaattgttagtgtgagaaattcactttagattctgttcatacaagcttacttactgttcattccaaaaattcaggctccacggcgtttgtaatgagaactccttggcaccattgattggctatcttgggctgaaattatatcgcactagtggcgacaactctgttctgtatgatcatgatttagaaaggtaatcttttagctcttgatcttacgcttttctttaccgatccgcacaatccttgttgattcttacatcaactctgtcaattgattctgttacagttatgcactctttgataaggctggccatcaggtctcaaaggagacagttgctaaagttgaagaaacatttgaaagaatt

SEQ ID NO: 4564 - DNA, 2076 bp, Zea mays
agcaccgcagagagaggagcgagagcgagcgacccccccgagccgtgccaaccaagaaccatccacccaccaccaccaccccggccgcttccttgtccctgcccctccgttggtctcctttgcccatctcatcctctctctctctctccctctctctctctctggcggtcggcgtggctccgggggcgcgaagcgcgggctcggcggggcgactcgccggcggcgacctgcaggtttgggtatgagaggggtcacccacgcggcgcccaccacaagcgccccccgcccccgcggacgcctcatggacggcctcctcatcttcgtcttctacctctcgctgcccacccgtgccggccgcgaccactcgtcaatcgccgcctctaattgttagccgccgccggcacgccattgctcggcccgcctcccgagaagctcgatctgcggcctagccagccagcctcacgcgggatcaggatcgatggaccagccaccgaatggattcgccgccggaggttttttcacgcacattgatgggcaaaaccgttctcccccttctgtaattgtcattgggggagggatttcaggcatcgcagctgcacgtgctttgtcgactgcttcatttaaggtcacactcttggagtccagggaccgacctggtggccgtgtgcacactgactattctttcggttgcccaattgacatgggagcatcatggttgcatggtgtttgcaatgagaattctttggcaccactgattaggatgcttgggcttaggttatatcgcacaagcggtgataactctgttctgtatgaccatgatttggaaagttatgctctttttgataagcatggtcagcaagttccccaggagatagtaagcaaagttggagagacatttgagagaattcttaaggagactgtcatagtaagagatgagcatgcaaatgacatgcctctttttcaagccatagcgatcgtgcttgacaggaatccgcatatgaagctgcagggcctggaatatgaagtactgcagtggtgcatatgtaggctggaggcatggttcgctactgacatggacaatatatctctgaaaacttgggatcaggaacatgtgcttaccggtggacatggtcttatggtgaatggctacgaccctgtcatcagagctctcgctcaaggtctcgatattcacctcaaccacagggtcacaaagatcatacaacgctataacaaggttattgtctgtgtggaagatggggcgagttttgtcgcagacgctgctatagtaaccgtccctctcggggtactcaaggcaaacatcatcaagtttgagcctgagctaccgaaagagaagctctcggcaatcgccgaccttggcgtcggtatcgagaacaagatagctctcaagttcgacactgtgttttggcccgacgttgaagtgataggtagggtggccccgacgtcaaacgcctgtggctactttctcaaccttaacaaagccacaggaaacccggtcctggtgtgcatggtggccggaaggttcgcgtacgagatcgagaagctgtcggacgaagagtccgtgaacttcgtcatgtcccagctcaggaacatgctgccgcaggcaactgacccggttcagtatctggtctcgcgctggggtagtgaccccaactcacttggctcctactcgtgcgacctggtggggaaaccagctgacctgtatgaaaggttctgcgctccggtgggcagcctgttcttcgccggggaggccgcctgcattgaccactccggatcggtgcacggagcttactcgtcaggcatcgctgccgcagaggactgccgaaggcgtctgtcggcgcagctaggcatctcggccggcctgttccaggtcgggaaggctgccatgagggaggagatgacggctgaagccatggtccccttccagatatccaggttgtaagagagaatctattcaacaccgtctttgtgtcaccggtttgttgcttgatgtaattgtaaaatggtgtaagaccttgtttgttggaataaaaaaaaaaaaaaaaaaaaaaaaaaaaa

SEQ ID NO: 4565 - DNA, 2168 bp, Zea mays
ctgcaacaagtctactacgagcgggcacggcgcctccgatttttttcacgggggagcgcccggggcgatgctataaaaaccgcgtctcctccacgccacctccgcaccgcagagagaggacagaggagcgagccatcatccccccccgagccgtgccaaccaagagccatccacccaccaccaccaccccggccgcttccttgtccctgcccctccgttggtctcctttgcccatctcatcctctctctctctctccctctctctctctctggcggtcggcgtggctccgggggcgcgaagcgcgggctcggcggggcgactcgccggcggcgacctgcaggtttgggtatgagaggggtcacccacgcggcgcccaccacaagcgccccccgcccccgcggacgcctcatggacggcctcctcatcttcgtcttctacctctcgctgcccacccgtgccggccgcgaccactcgtcaatcgccgcctctaattgttagccgccgccggcacgccattgctcggcacgcctcccgagaagctcgatctgcggcctagccagccagcctcacgcgggatcaggatcgatggaccagccaccgaatggattcgccgccggaggttttttcacgcacattgatgggcaaaaccgttctcccccttctataattgtcattgggggagggatttcaggcatcgcagctgcacgtgctttgtcgactgcttcatttaatgtcacactcttggagtccagggaccgacttggtggccgtgtgcacactgactattctttcggttgcccaattgacatgggagcatcatggttgcatggtgtttgcaatgagaattctttggcaccactgattaggatgcttgggcttaggttatatcgcacaagcggtgataactctgttctgtatgaccatgatttggaaagttatgctctttttgataagcatggtcagcaagttccccaggagatagtaagcaaagttggagagacatttgagagaattcttaaggagactgtcatagtaagagatgagcatgcaaatgacatgcctctttttcaagccatagggatcgtgcttgacaggaatccgcatatgaagctgcagggcctggaatatgaagtactgcagtggtgcatatgtaggctggaggcatggttcgctactgacatggacaatatatctctgaaaacttgggatcaggaacatgtgcttaccggcggacatggtcttatggtgaatggctacgaccctgtcatcagagctctcgctcaaggtctagatattcacctcaaccacagggtcacaaagatcatacaacgctataacaaggttattgtctgtgtggaagatggggcgagttttgtcgcagacgctgctatagtaaccgtccctctcggggtactcaaggcaaacatcatcaagtttgagcctgagctaccgaaagagaagctctcggcaatcgccgaccttggcgtcggtatcgagaacaagatagctctcaagttcgacactgtgttttggcccgacgttgaagtgataggtagggtggccccgacgtcaaacgcctgtggctactttctcaaccttaacaaagccacaggaaacccggtcctggtgtgcatggtggccggaaggttcgcgtacgagatcgagaagctgtcggacgaagagtccgtgaacttcgtcatgtcccaactcaggaacatgctgccgcaggcaactgacccggttcagtatctggtctcgcgctggggtagtgaccccaactcacttggctcctactcgtgcgacctggtggggaaaccagctgacctgtatgaaaggttctgcgctccggttggcagcctgttcttcgccggggaggctgcctgcattgaccactccggatcggtgcacggagcttactcgtcaggcatcgctgccgcagaggactgccgaaggcgtctgtcggcgcagctaggcatctcggccggcctgttccaggtcgggaaggctgccatgagggaggagatgacggctgaagccatggtccccttccagatatccaggctgtaagagagaatctattcgacaccgtctttgtgtcaccggtttgttgcttgctgtaattgtaaaatggtgtaagaccttgtttgttgaaaaaaaaaaaaaaaaa

SEQ ID NO: 4566 - DNA, 2060 bp, Zea mays
gcgagagcgagcgacccccccgagccgtgccaaccaagaaccatccacccaccaccaccaccccggccgcttccttgtccctgcccctccgttggtctcctttgcccatctcatcctctctctctctctccctctctctctctctggcggtcggcgtggctccgggggcgcgaagcgcgggctcggcggggcgactcgccggcggcgacctgcaggtttgggtatgagaggggtcacccacgcggcgcccaccacaagcgccccccgcccccgcggacgcctcatggacggcctcctcatcttcgtcttctacctctcgctgcccacccgtgccggccgcgaccactcgtcaatcgccgcctctaattgttagccgccgccggcacgccattgctcggcccgcctcccgagaagctcgatctgcggcctagccagccagcctcacgcgggatcaggatcgatggaccagccaccgaatggattcgccgccggaggttttttcacgcacattgatgggcaaaaccgttctcccccttctgtaattgtcattgggggagggatttcaggcatcgcagctgcacgtgctttgtcgactgcttcatttaaggtcacactcttggagtccagggaccgacctggtggccgtgtgcacactgactattctttcggttgcccaattgacatgggagcatcatggttgcatggtgtttgcaatgagaattctttggcaccactgattaggatgcttgggcttaggttatatcgcacaagcggtgataactctgttctgtatgaccatgatttggaaagttatgctctttttgataagcatggtcagcaagttccccaggagatagtaagcaaagttggagagacatttgagagaattcttaaggagactgtcatagtaagagatgagcatgcaaatgacatgcctctttttcaagccatagcgatcgtgcttgacaggaatccgcatatgaagctgcagggcctggaatatgaagtactgcagtggtgcatatgtaggctggaggcatggttcgctactgacatggacaatatatctctgaaaacttgggatcaggaacatgtgcttaccggtggacatggtcttatggtgaatggctacgaccctgtcatcagagctctcgctcaaggtctcgatattcacctcaaccacagggtcacaaagatcatacaacgctataacaaggttattgtctgtgtggaagatggggcgagttttgtcgcagacgctgctatagtaaccgtccctctcggggtactcaaggcaaacatcatcaagtttgagcctgagctaccgaaagagaagctctcggcaatcgccgaccttggcgtcggtatcgagaacaagatagctctcaagttcgacactgtgttttggcccgacgttgaagtgataggtagggtggccccgacgtcaaacgcctgtggctactttctcaaccttaacaaagccacaggaaacccggtcctgatgtgcatggtggccggaaggttcgcgtacgagatcgagaagctgtcggacgaagagtccgtgaacttcgtcatgtcccagctcaggaacatgctgccgcaggcaactgacccggttcagtatctggtctcgcgctggggtagtgaccccaactcacttggctcctactcgtgcgacctggtggggaaaccagctgacctgtatgaaaggttctgcgctccggtgggcagcctgttcttcgccggggaggccgcctgcattgaccactccggatcggtgcacggagcttactcgtcaggcatcgctgccgcagaggactgccgaaggcgtctgtcggcgcagctaggcatctcggccggcctgttccaggtcgggaaggctgccatgagggaggagatgacggctgaagccatggtccccttccagatatccaggttgtaagagagaatctattcaacaccgtctttgtgtcaccggtttgttgcttgatgtaattgtaaaatggtgtaagaccttgtttgttggaatattcgatggtggatgctgtttttcgtcaggt

SEQ ID NO: 4567 - DNA, 1809 bp, Zea mays
cggaagccaccaccaccggcaggggaagcggaaggggagcacctcgggccaggcaagatggtgctcgcgcagctgggcgggagcatctcccgcgccctggcgcagatgagcaacgccacggtgatcgatgagaaggtgctcaacgactgcctcaacgagatctcgcgcgctctcctacaggccgatgtccagttcaagatggtccgcgacatgcaggccaacatcaagcgcatcgtcaacctcgaggcgcttgccgcaggcaccaacaagcgccgtatcatgcagcaggctgtcttcacggaactctgcaacatgttagatcccgggaagccttctttcactcccaaaaagggcaagccaagcgtagtcatgtttgttggtctgcaaggttcgggtaaaactaccacttgttcaaaatatgcttattatcatcagaagaaaggattcaaaccagcgctggtttgtgccgatacatttagagctggtgcttttgatcagttaaagcaaaatgcaacgaaggccaagattcccttttacggaagttacatggaatctgatccagtgaaaattgctgttgagggtgtggagaggttcaagaaagaaaactgtgatctcatcattgtggatacaagtggaaggcacaaacaagaagcagcactctttgaagaaatgcggcaagtttcggaagcaacaaaaccagacttggtgatttttgtgatggacagtagtataggtcaggctgcatttgatcaagcacaggcatttaaacaaagtgtttctgttggtgctgtgattattacaaaaatggatggtcacgcaaaaggtggcggcgcccttagcgcggtcgcagcaacaaaaagtcctgttatattcattggaactggagagcacattgatgattttgaagtttttgatgtgaagccatttgttagtcgcctgttaggtatgggagattggtcaggctttatggacaagattcatgaagtgatacctacagatcaacagcctgaccttctgcagaaactgtctgaaggaagctttagtctcaggcttatgtatgagcagttccagaaccttcttaaaatgggtcctattggccaggtcttctctatgttgccagggtttagcgctgaactaatgccaaaaggacatgagaaggaaagccaggctaagattaagcgctacatgacaatgatggattccatgactgatgcagagcttgacagcacaaatcctaagttgatgactgaatcacggatcattcggattgcacgggggtctgggcggcctgtcagggatgtcatggacatgctggaagagtacaagcgacttgctaaaatctggggcaagatgaagggtctcaagctccaaaagaaaggggacatgagtgcactgacccgcaacatgaatgttcagcagatgagcaaggcccttcctccgcagatgcttaaacagattggtggcatgggcggtctgcagtctctgatgaaacagatgggatcgaaggagatgagcggaatgtttggaggcatgggtggttgacttgtttttggtggatcgtcgctgtgatgctaaattgagagcgtttaatgctgcggtctgatcaccatcagagcattccctgaagatcagcctgcgctatgttttggatcaggcttagcgtagctccccatgcctgcaaatttaacctatatgaacagtacgtttgtcctctgaaaaaacggataaggtatatattacaaagcgaatatgcttatgtagatggttactccaaacattagtcttccagtggtggtgtcgttgggttgg

SEQ ID NO: 4568 - DNA, 1676 bp, Sorghum bicolor
cgcccgcttcctctccatcacaccctctcctccgagccgcccccgcttttctcctcccgcgcccctccgcgagctccctgcccctcgcgctcccgccggcgacaagctcccgccagagtgaggtagatcagggtgctgtgccggcacgcgtggaagggatggagggcctcgcgggttcgcgtggcggcggggggtgcggtggtcttgacgcgcagatcgagcagctcatggagtgccgcccgctcgcagagacggaggttaaaacactgtgtgagaaggccaaggagatattaatggaggaaagcaatgttcagccagttaaaagccctgtgacaatttgtggtgatattcatggccaattccatgatcttgtagaacttttccggattggtgggaagtgtccagatacgaattatttgtttatgggtgattatgtggatcgtggctattactctgttgagacagtaacgcttttggttgcacttaaggtgcggtacccacaacgcatcacaattcttcgtggaaaccatgagagtaggcagatcacacaggtgtatggcttctatgatgaatgcctacgaaaatatggcagtgcaaatgtctggaagatcttcactgatctttttgattattttccgttgacagcattggtggaatcagaaattttctgcctccatggcggtttatctccatccatagagaatcttgatagtgttcgtagtttagatcgtgtccaagaggtccctcatgagggacctatgtgtgaccttctatggtctgatccagacgatcgatgtggctggggcatatctcctcggggcgctggatacacttttggccaagacatatcggaacagtttaatcacaccaacaatcttaaacttgtagctcgggctcaccagttggttatggagggatacaactgggcacatgaacaaaaggtggtgaccatattcagcgcacctaattactgttaccggtgtggcaacatggcatccatcctcgaggttgatgattgcaggaatcacacatttattcagtttgagccagctcctaggagaggtgaaccagatgtgacacggaggacacctgattatttcctttgagttatctgccatactatttcagattttgtcaatattgcaatagtgatgctggtcagtaacatttttgttggatctatatggtaacttaaccgaccagcaacagtaagaaaatgtggaagctgcttatctgcatttgtcattgcaagaggttctatcagatcaacctacatcccaagctgtcaaaagatccgcttgtctacccagtggtgaattggcacctcccttgggctttggccccatagaccttcactgtttcgaagggcgttgggacgtcggagcttacattttcagcgtaagttgcctcagttctgtcttctgtgtcagctagttttgtggttgtgtgattgttagttgtaacttctgtgattaaatgacaacagacaagctgatcttgttgcgagaattggaaacaattcaatgattctgctagttcttcctttgtttctttatccatgcccttgatacacgagtgttagccactctcatgtagcagcaacacgttacagtcaagttcgcatgtcatttttatcatgttaatgctcatggtaaggtaattaaatgaacaatgtt

SEQ ID NO: 4569 - DNA, 1489 bp, Zea mays
ttttttttctactcccgcgcccctccgcgagctccctacccctcgcgctcacgccggcgacaagtttccgccagagttaggtagatcaggtgctgcgccggcagccgtggaagggatggaggacctcgcgagttcgcgtggcggcgggggatgcggtggtcttgatgcgcagatcgaacagctcatggagtgccgcccgctcccagagacggaggttaaaacactgtgtgagaaggccaaggagatattaatggaggaaagcaatgttcagccagttaaaagccctgtgacgatttgtggtgatattcatggccaattccatgatcttttagaacttttccggattggtgggaagtgtccagatacaaattatttgtttatgggtgattatgtggatcgtggctattactctgttgagacagtaacgcttttagttgcacttaaggtgcggtacccgcaacgcattacaattcttcgtggaaaccatgaaagtaggcagatcacacaggtgtatggcttctatgatgaatgcctacgaaaatatggcagtgcaaatgtctggaagatcttcactgatctttttgattattttccgttgacagcattggtggaatcagaaattttctgcctccatggtggtttatctccatccattgagaatcttgataacgttcgcagtttagaccgtgtccaagaggtccctcatgagggacctatgtgcgaccttctgtggtctgatccagacgatagatgtggctggggcatatctccacgtggtgctggatacacttttggccaagacatatcggagcagtttaatcacaccaacaatcttaaactcgtagctcgggctcaccagttggttatggagggatacaactgggcacatgaacaaaaggtggtgaccatattcagcgcacctaactactgttaccggtgcggcaacatggcgtccatcctcgaggtcgatgactgcaggaatcacacatttattcagtttgagccagctcctaggagaggtgaaccagacgtgacgcggaggacacctgattatttcctttgagttatctgccagaccatttttggaatttgcccaatgttggaatagtgatgctagccagtaacaatttttgttggatctatatgataacttaaccgaccagcaacagtaagaaaatgtggaagctgcatctgtcattgcaagaggtgctcgctaacagtaacaggtcgacgacctatacaccccaagctgtcaaaagatccgcttgtctacccaacccaccaagtggtgcctcccttgggctttgggacgtcgagtttacgctttcagcgtagagttgcctcagttctgtcttgtgtgtcagctagttttgtgtttgtgtcttgtgtggttgctcgttgtagcttctgtgattaaatgacaacagacaagctggtctcgagtgttgcaagaaaaaaaaaaaaaaaaaaaacaaaaaaaaaaaaaaaa

SEQ ID NO: 4570 - DNA, 2219 bp, Sorghum bicolor
ggctctgcccctctccccgatttccttccccactctgtcagtctcactccccgcgcgcgcgcgcgctctccctccctccctcctcgcctcgccgccggcgacgagctcgagctcgagctggttcctcgtatagaagacggccaccgcggtatggagcccatgaacgtagacaacggcggctgcggcggcctggacgcgcagatcgagcagctgatgcagtgtcgcccgctcgccgagcaggaggttaaggcactgtgcgagaaggccaaggagatattgatggaggaaagcaacgttcagcctgtcaagagtccagtgacaatatgtggtgatatacatgggcaattccatgatcttgtagagcttttccgaattggcgggaagtgtccagacaccaattacttatttatgggggattatgtagatcgtggctactattctgttgagactgtcactctgctagtagcactaaaagtgaggtacccacatcgaattacgatccttcgtggaaaccacgagagtcggcagatcacacaggtgtatggattttacgatgaatgcctacgaaagtatggcaatgcaaatgtatggaagacatttacggatctttttgattattttcctctgacagctctggtggaatctgagattttctgccttcatggtggtttatctccatcaattgaaaatcttgatagtgtgcgcagcttagatcgagtccaagaggttcctcatgaggggcctatgtgcgatcttttatggtcagatccagatgatcgatgtggttggggcatatcccctcgtggtgctggctacacttttggccaggacatatcggagcagttcaatcacacgaacaatctcaaacttgtagctcgggctcatcaattagttatggagggatataactgggctcatgaacaaaaggttgtcaccatattcagtgctccaaactattgctatcgatgtggcaatatggcatccattttggaagtcgatgactgcaacagtcacacattcatccagtttgaaccagcccctaggagaggtgaaccagacgtgacgcgaagaacaccggattatttcctttgagctgtcgatgttgccatttcccagcttgtgccgtgataatctatgtcaacatctgctggatcaagggccacacagaaataacaggggaatacaaaagcactatgcaaaacttgagggccccattgccattggtcagtgcaagagatgctgcaatcctgagctgagaaagcaattgtgccaagccatgcccgagtttcagctttcaggtgatatataagggcggccatccacttacaactcttgccgccctcccttttatgcactttttacagaggcgtggaattggcaaaaaagactcaacttccatttgtacttgtgtagcgtaagcttgtaccaataggcgtgtactaatttgtatcatcattcatcaatggcaagccactgttaaacaccttctcatcagtaaattaaattttggtaaagaatggcttacagtgttaagaatggcactagcagacagcaccatgttcagattgctagtgttttgtgtgagtgatatgtgcatgagtgcaaccttgatgaatttcggtcactgataatcacagccttcattttttgttttgactacacgagagtacaagaatcaacagctcaagacggaggagacatgaacaatctcgtatatctatcagtaatgcgatgcaagcatggcgtacccaagtcaaccttagattgctgctacgtactgtggaaatggagaggcaagattgggcgtcgtcggtcatcggccgtgttgtggcagtggcatgtcatatagcaacagcaacagtctgggcctggcagatagcccgccgtcgcgcatccctttgccggccggccggccggccgacggtcacacggaggtgctggcgagcagctggttggcggcgacgcccctgcccttcatgacgtgcttgcggaggcccgggatgtggacgttggtgatgtagtccctccagtcgacgctccggacgtcgaagtggaaccgcgccctctccgccggcgacatggccgcgaacagcgcctccgtgttgccgttgtcgaagcggccgccgtagaaggtgtagggctggtagatgctgcccaggtggacggtctgctccacggacctggcgcacaggtcgcgggcacgctgcgccaccgccggc

SEQ ID NO: 4571 - DNA, 1503 bp, Zea mays
agtatccagactctctctcgggcctctcggctctcctctccccgatttccttccccacccgctgtcagtctcactccccccgcgcgcgctctctctttcctcgccttcgccgccggcgacgagcttgagctcgagctggttcctcgtatagaagacgacggccgcggtatggagcccatgaacgtagacaacggcggctgcggaggccttgacgcgcagatcgaacagctgatgcagtgccgcccgctcgccgagcaagaggttaaggcactgtgcgagaaggccaaggagatattgatggaggaaagcaacgttcagcctgtcaagagtccagtgacaatatgtggtgatatacatggacaattccatgatcttgtagagcttttccgaattggcgggaagtgtccagacaccaattacttatttatgggagattatgtagatcgtggctactattctgttgagactgtcacgatgctagtagcactaaaagtgaggtatccacatcgaattacaatccttcgtggaaaccacgagagtcggcagatcacacaggtgtatggattctacgacgaatgcctacgaaagtatggcaatgcaaatgtatggaagacatttacggatctttttgattattttcctctgacagctctggtggaatctgagattttctgccttcacggtggtctatctccatcaattgaaaatcttgatagtgtgcgcagcttagatcgagtccaagaggttccccatgagggacctatgtgcgatctcttatggtcagatccagacgaccgatgtggttggggcatctcccctcgcggtgctggctacactttcgggcaggacatatcagagcagtttaatcacacaaacaatctcaaactcgtagctcgggctcatcaattagttatggagggatataactgggctcatgagcaaaaggttgtcaccatattcagtgctccaaattactgctatcgatgcggcaatatggcatccattttggaagttgacgactgcaacagccacacattcatccagtttgaaccagcccctaggagaggtgagccagatgtgacgcgaagaacaccggattatttcctttgagctgtcgatgttaccgtttcccagcctgtgtcgtgataatcgatgccaacgtctgctggatcaagggccagacagaaataacaggggaatgccgaagcactatgcccagagtttcacccttttcaggcgacagagaagggcggccatccacctacaactctggccgccctctgttttatgcactttttacagagtcgtggaactggccaaaaagaccggagtaccatttgcacctgtgtagcgtaagcttgtactacaaataggcgtgtgctaatctgtatcaccattcatcaattgcaacgaactgttgaactccttccatcagtaaagtaaattttggtaaaagaacggcttacagtgtcggtaatgacactatcaaaaaaaaaaaaaaaa

SEQ ID NO: 4572 - DNA, 1405 bp, Zea mays
cttccccacccgctgtcagtctcactccccgcgcgcgcgctctctctttcctcgccttcgccgccggcgacgagcttgagctcgagctggttcctcgtatagaagacgacggccgcggtatggagcccatgaacgtagacaacggcggcagcggtggccttgacgcgcagatcgaacagctgatgcagtgccgcccgctcgccgagcaagaggttaaggcactgtgcgagaaggccaaggagatattgatggaggaaagcaacgttcagcctgtcaagagtccagtgacaatatgtggtgatatacatggacaattccacgatcttgtagagcttttccgaattggcgggaagtgtccagacaccaattacttatttatgggagattatgtagatcgtggctactattctgttgagactgtcactatgctagtagcactaaaagtgaggtatccacatcgaattacaatccttcgtggaaaccacgagagtcggcagatcacacaggtgtatggattctacgacgaatgcctacgaaagtatggcaatgcaaatgtatggaagacatttacggatctttttgattattttcctctgacagctctggtggaatctgagattttctgccttcatggtggtctatctccatcaattgaaaatcttgatagtgtgcgcagcttagatcgagtccaagaggttccccatgagggacctatgtgcgatctcttatggtcagatccagacgaccgatgtggttggggcatctcccctcgcggtgctggctacactttcgggcaggacatatcagagcagtttaatcacacaaacaatctcaaactcgtagctcgggctcatcaattagttatggagggatataactgggctcatgagcaaaaggttgtcaccatattcagtgctccaaattactgctatcgatgcggcaatatggcatccattttggaagttgacgactgcaacagccacacattcatccagtttgaaccagcccctaggagaggtgagccagatgtgacgcgaagaacaccggattatttcctttgagctgtcgatgttaccgtttcccagcctgtgtcgtgataatcgatgtcaacgtctgctggatcaagggccagacagaaataacaggggaatgccgaagcactatgcccagagtttcacccttttcaggcgacagagaagggcggccatccacctacaactctggccgccctctgttttatgcagtttttacagagtcgtggaactggccaaaaagaccggagtaccatttgcacctgtgtagcgtaagcttgtactacaaataggcgtgtgctaatctgtatcaccattcatcaattgcaaggaactgttgaactccttccatcagtaaagtaaattttggtaac

SEQ ID NO: 4573 - DNA, 1110 bp, Triticum aestivum
tgccttttcccacggtcggcggaggaggaggcgggcgtgagaggacatggagcccatgagcgtggacagcagcggctgcggcggcctggacgcgcagatcgagcagctcttgcagtgccgcccgcttgccgagcaagaggttaaagcactatgcgagaaggctaaggagatattgatggaggaaagcaatgtgcagccagtcaaaagcccagtgacaatctgcggtgatattcacggacaattccatgatcttgttgagcttttccggattggcgggaagtgcccagatactaattatttgtttatgggggattatgtggatcgtggatactactccgttgagactgtttctctcttggtagcactgaaggttcgccacccacatcggattacaatcctccgcggaaaccatgagagtcggcagatcacacaagtatatggattctacgatgaatgcctacggaagtacggcaatgcaaatgtatggaagatattcacagatctttttgattatttcccattaacagccctggtggaatctgaaattttctgcctgcatggtggtttatctccatcgattgagaatcttgatagtgtgcgtagcttggatcgtgtccaagaggttccacatgagggacctatgtgtgatcttttatggtctgatccggacgatcgatgtggttggggcatttctcctcgtggtgctggctacacttttgggcaggacatatctgagcagttcaatcacaccaacaatctcaaacttgtagcccgggctcatcagttagtcatggagggatataactgggctcatgaacaaaaagttgttaccatattcagtgctccaaactattgttaccgatgtggcaacatggcgtccattttggaagttgatgactgcaatgctcacacctttatccagtttgagccagcccctcggagaggtgagccagacgtgacaaggagaacacctgattatttcctttgagtaaactggctgcaccatttctcagcttgtattgcgatagtccgcaccgatcagtgagattctgctggatccaaatctgcacatgagcaaatgaaacaataacaaaggggtataccagagcc

SEQ ID NO: 4574 - DNA, 1507 bp, Zea mays
ctccccgatttccttccccactctgtcagtctagtgccccgcgcgcgctctctcgccgcctcgccgccggcgacgagcttgagctcgagctcgagctggtttctcgtatcgaagacgcggccgcggtatggatcccatgaacgtagacaacggcggctgcggcggccttgacgcgcagatcgagcagctgatgcagtgccgcccgctcgccgagcaggaggttaaggccctgtgcgagaaggccaaggagatattgatggaggaaagcaacgttcagcctgtcaagagtccagttacaatatgtggtgatatacatggacaattccatgatcttgtagagcttttccgaattggtgggaagtgtccagacaccaattacttatttatgggggattatgtagatcgtggctactattctgttgagactgtcactctgctagtagcactaaaagtgaggtacccacatcgaattacaatccttcgtggaaaccatgagagtcggcagatcacacaggtgtatggattctatgacgaatgtctacgcaagtatggcaatgcaaatctatggaagacatttacggatctttttgattattttcctctgacagctctggtggaatctgagattttctgccttcatggtggcttatccccatcaattgaaaatcttgatagtgtgcgcagcttagatcgagtccaagaggttcctcatgagggacctatgtgcgatcttttatggtcagatccggacgatcgatgtggttggggcatatccccacctggtgctggctacacttttggccaggacatatcggagcagtttaatcacacaaacaatctcaaacttgtagctcgggctcatcaattagttatggagggatataactgggctcatgaacagaaggttgtcaccatattcagtgctccaaactattgctaccgatgcggcaatatggcatccattttggaagttgacgactgcaatagtcacacattcatacagtttgacccagcccctaggagaggcgagccagatgtgacacgaagaacaccggactatttcctttgagttgtggtgttaccaattcccagcttgtgctgtgataatcgatgtcaacgtctgctggatcaagggccagacagaaataacaggggaataccaaagcactatgcgaaacttgaggtcctcattgccattggtcagtgcaagagatgtctgcaatcctgagagaaagcaattgtgccaagccatgcccgagtttcagccttttcaggtgatatagaggagcggacatccatttgttacagctctcgccgccctcccttttatgcactttttacagaggcttggaattggcaaaaaagaccgaactttcaattgtacttctgtagcgtaagcttgtaccaataggcgtgtactaatttgtatcatcattcatccatggcaagacattgttaaactccttttcatcagtaaattaattttttgttaaaaaaaaaaaaaaaa

SEQ ID NO: 4575 - DNA, 1715 bp, Oryza sativa Japonica Group
agtttctctctcttctcttctcttctctctctcagtctcactctcccaatccgcctcggcccgagcgcgcgcgcgctttccccccctcgccgccggcgacgagctcgaggcggcggtgcgctcgcctacctccggagggcggagcggggggatggagcccatgagcgtggacggcggcgggggatgcggcggcctggacacgcagatcgagcagctgatgcagtgtcgcccgctcgccgagcaggaggttaaagcactgtgcgagaaggccaaggagatattgatggaggaaagcaatgttcagcctgtcaaaagcccagtaacgatttgtggtgatattcacggacaattccatgatcttgtagaactttttcggatcggtgggaagtgcccagatactaattatttatttatgggggattatgtggatcgtggctattactctgttgagactgttactcttttggtagcgctgaaggtgcgtcacccacatcggattacaatccttcgcggaaatcacgagagccggcagatcacacaggtttatggattctacgacgaatgtttacgaaagtatggcaatgcaaatgtatggaagatattcacggatttatttgactattttccactgacagcactggtggaatctgaaattttctgcctgcatggtggtttatctccatcaattgagaaccttgatagtgtgcgtagcttagatcgtgtccaagaggttccgcatgagggaccaatgtgtgatcttctatggtctgatccagatgaccgctgtggttggggcatatctcctcgtggtgctggctacacttttgggcaggatatatccgagcaattcaatcacaccaacaatctcaaacttgtagctcgggctcatcaactagttatggaaggatataattgggctcatgaacaaaaagttgttactatattcagtgctccaaattattgttaccgatgtgggaatatggcatccattttggaagttgatgactgcaacagccatacttttattcagttcgaaccagctcctaggagaggtgagcctgacgtgacacggaggacgcccgattatttcctttgagttaatggtgctaccatttgtcaccttgtactgcgaatttgcgatagtcaaatgctggtcagtgatactttgctggactgtgaaacctgcgcataggccaaccaacaataacaagggaacatcagatcccttcgtaaaacttgaccctccattggtcaatgcaagagatgctgctatcctgaaacaaagtgtcatgctcatgcagcgatgcctgagtttttcaggtgataaaaaaggcccatccatcctcaccctctcctttttaggcatttttacagaggaaatctagtggcaagactgaacttctatttgtattttgtagcgtaagcttgtatcgatagtcttgtaatttgtatcatcaatggcaaggcaacctaatcatctttcggtgtagtattccgaattttgggggtggttaccctgatgtgctacagtgcagtgttccatggcacctttttctctagttggatgtttttcttcgcatgtatctgacattctggttttcaaatttcgcactactctactagtactccatactgttctagacatgtacttgatcaaagccaaaaacttggtcaaccgatgttctctctgctaaattatattctgaattatgtgc

SEQ ID NO: 4576 - DNA, 2410 bp, Zea mays
gcccagtttgcaatgtcagtcgatacaagaagagctacaatcaagactatgtaaaaaaatcccgaagaaaaataaaaacaagaaatccactattggacctgaaagtgacgatgacacttttgatgacatggatgggaaaaagaagtcaaagatcccagctttggtgttgtggtatcttccagtaatttatcgcttaaaacgtttgttctcaaatcatagggaggctgagcttatgcgttggcatgctgaaaatcgcaagcagaataacaaacagattcgacaccctgctgatgcatcacaatggaaaaatttcgatcttatgtatcctgagtttgccaaagaaaccagaaatgtaagatttgctttgggtatagacggaatgaatccatttggtgaaaaaagaagtgtacatagcacctggcccgtgactttaacgatgtacaaccttccatcatggttgtgtcacaaaagaaagtacattatgttgactattcttattcaaggtccgaaatcagctggtgttgatattgatgtgttcctagaacctcttatggaagatatgacaaagctctggaatgaaggagttagaatatgggatgagtattgccatgagtatttcaacttaagagcaattatatttgttaccatccatgattctccaggtggcgccacactatcagggcaaaagactaaaggaaagaatggttgtgtagtgtgcgtcgatggaactgcttccatgtaccttaaatcatccaagaagttggtgttcatgggacacagacggttcttgatgaagcagcataagtaccgaaagatgaaagaggaatttaacaatcaactggaaagtgaaggtgcaccaaagccttatagtgggaaacttgtttttgaaattgtaaagaacattcatgttgtattcggaaaggaaaaaaacaaaggagaaaagagaaagagaattgacccttcaacttacacaactttcaagaagcaatcaatttttttcaagtacctcccatactggaaggatatggaaatttgccacagcattgatttgatgcatgtaacaaaaaatgtttttgacagcatcatcggaaccttgctgggcatgccgagtaagacaaaagacggacttaaatcacgcaatgatctagtagatcttcaaatcagaccggaacttcatccagtggatagtggcaaagggaagccttacctccccccagctagctacaacttgttagttgaggagagaacaaagatttgcaaatgtttgcgtggggtcaaagtgcccacaggtttctcatccaatatcagcaaactactgaggatgaaggacttgtctctatttggctacaactctcatgactgccatgtgatgatgacggtgttcctcccaattgtggtaagagccctcgaaacagagcatgtcaaagttgtcatcacacgcttgtgttactttttcaatgcggtttcacaaaaagtaatagctttagaagacttggactatctaaaggcatacatcatcgaggctatgtgcaagcttgaaatgtgttttcctccatcattttttgatatgcaagtacacctaatcatacatctcgtggatcagataaaaatattagggccactatatttacatcatatgtttcagttggagcgatacctgggagtattaaaaggttatgtgcgaaatcacgctcacccagagggttcaatcatggagggatacactacagaagaagtgattgagagctgtatagattacatcagtgacggaacaatgataggtgtgcctgtacctaaacatgagggtaaactatgtgggagagggagaatgggcaagaaaacttttcgcgttgaggattacaaactagtacattgtgctcatggtagtgtactacaacatctcacgatagccgagccttacatagaggaacacctggatgagcttcgtaaagaaaatcagaaccgcacagaggactggatcatgagggagcacaaacatcgtttcagcgaatggttaatggacaaaaacatcccattcggagactctttggaagagaaaacaatgaagaatttggcttctgggccatcgtgttttgtgacatcatggcaagcatatgacatcaatgggtacacattctatactaaatcaaaaaacatgaaaagtgttgcacaaaatagcggtgttcgtatcgatgcttttgacctacatggacagaagaccacatattttggattcatagaggaaatatgggaacttgattatggcccaagcatgaaaatacccttatttaagtgccaatgggtacaacatcccgtgggggtgatagtggataactacggactcacactggtagacttaaagaaagtaggatataaagataacccgtgggttctcgccgaatgtgttgca

SEQ ID NO: 4577 - DNA, 2148 bp, Zea mays
tcccagatcaggattagccgaccacccgccgaaggccagagagaaatatctcatcttctctccaccggatcggttcaatcgagagcgagggagaaagggaggtggtgcgtcgaggggggccgagattttgccggtttggagccaaataggggtatgagctgcttcgcgcaccgccgccgctccgacgtcgcccgccgccaggacggcctcctcgtcttcgtcttcttcctctcgattcccatacgtaccagtagttttaatttaagtagtagtaattgtagtagcaatctcttgtaaactgcgctcgcctttgcgtgttcgtggtccttttgcgctttctcgtccctctttctctcaatctctccttattcttctccttccacggcgaagccggcggctggtatggatcccaatggcctcaaaactggaggccttttgctcccgaccatcgagaggcggtgcacgtcgcctccatccgtcattgtcatcggcggtggcatctcgggcgttgcagctgcccgtgccctctccaattcttcatttaaggtgactgttttggaatcgagagatcgtattggcgggcgcattcatactgataactcgtttggatgcccaattgatatgggagcctcatggctacacggcgtgtgcaatgagaatccactggcaccattgataagctatcttgggctgaggttataccgcacaagcgatgataactcagttctgtatgatcatgatttagaaagctatgctctctttgataaggatggtaatcaggtcccaaaggagacagtcgataaagttggagaaacattcgagagaattcttgaagagacggtgaaagtgcgcgatgagcaggaacacgacatgccactgctacaggcaatttctattgtgtttgagaggcacccccatctaaagcttgaagggctagatgatcaggtcttacaatggtgtgtctgccggcttgaggcatggtttgctgcagatgcagatgaaatatctctgaagaactgggatcaggagcgtgttcttactggtggacatggactgatggtaaatgggtactatcctgttattgaagctcttgctcaaggtcttgacatcaggcttaaccaaagggtcaccggaattacccgccagcacaatggagtcaaggtcactactgaagatggcacaagctacttggccgacgcctgcataatctcagtgccactcggcgtgctcaaggcgaacgtaataaagttcgagcctgagctgccccagtggaagagctccgccatcgccgacctcggcgtgggcaccgagaacaagatcgccatgcacttcgacagggtcttttggcccaacgtcgaggtgctgggaatggtcgggccgacgcccaaagcctgtgggtacttcctgaacctgcacaaagccaccggcaatccagtcctcgtgtacatggccgccggaaggttcgcccaggaggtggagaagctgtcggacaaggaagccgtcggcctggtcgtttctcacctgaagaagatgctcccggatgccactgaaccgacgcagtacctggtgtcgcgatggggctccgaccccaactccctggggtcctactcgtgcgacctggtcgcgaagccggccgacgtgtgcgcgaggttcgccgcccccgtcgagaacctgcacttcgccggcgaggcggccagtgccgagcactcggggtccgtgcacggcgcctactcgtcgggcatcgccgctgccgaggaatgcaggaagcggctcctggcgctgaagggcatcccggacctggtccaggtcgcggcgtgggaggagatggccggagctgtggctcctctgcagatttgcaggacctgagtgagattggatcactggctgcctttggacattggagtggatcgtggatcgcttcgctgctccctgatggttgccgagtctttttttatatttaccttaccttgaaggccgttgtgtcttgtctggaataaatcaagattgactggcactgaaagtgtcatcgcgtcactctttcatacttattaataaatatcacaagtctgtcctgagatctcagcctggtgcctgcgtgctgcctttgccttgtatatgacgttttactttgaaaaaaaaaaaaaaaaa

SEQ ID NO: 4578 - DNA, 1515 bp, Sorghum bicolor
atgtcggagtccgaggcgacgctggaggacacgccgacatggatcgtggcgtccgtgtgctccgtcatcgtcctcatctccttcgtcttcgagcgcgcgctccatcgcctcggcaaggcactgcagcgccggaggaagaccctgtacgaggcgctgctgaagctcaaagaagagctgatgctgctggggttcgtctcgctgctgctcgtcgtcttccaggagctgatacagaagatctgcatcgacgagggcctcatggagcactggctgccgtgccggggcgcgagcgccaccaccacctcggcgtcggaggcgacggttcgtcacggcgtctcctcctccgcagtcgtcgtcggtggcgggaggaggatgctcaaaggcggcggggcagcttttgggcactgttcaagcaagggaaaagtcccgttgctatcacttcacgccttggagcaggtacacattttcatcttcgtcctagccatcagtcaagtcgttctcagcgtcgccaccgtcctcctgggacttctacagatgcggatatggatgcactgggagaacaccattcaggaagagggcagctctgctcccaagatgatcgcccgtgtgcagaaaatcaggttcgtccaggactggtgtaaggggtacgagaaggtcacttgggtcataatatggctgcgttccttcttcaagcagttctacggatcagtatccaacgacgactacattgcgatgaggcttggtttcgtcatggagcactttagggggcaccccaagttcaatttttatgactacatgatcaaagctctcgagaaagatttcaagagagtagttagtataaaatggtattactggatttttgtgatgatctttttgctactcaacatcaccgggtggcattcctacttctggatctcattagttccgttggctctgctgcttctgattggaacaaagctggagcacatcataaacaagctggcctacgaggtggcctccaagcacgccgctgggcaagggggtgaagggggcatcgtcgtgagcccttcagacgagctgttctggtttcacagcccacggctggtgctcgtcctcatccacttcatcctctttcagaacgccttcgagttcgcgtatttcttctggacactggcgatgttcggcgtcaactcctgcattatggacagtctaggatacagcgtatcgcgaatcatcatatgcgtcgtcgtccaggtgctctgcagctacagcacgctcccgctctacgccattgtgtcccatatggggagttcgttcaagagcgccgtgttcgcggacgacgtcgccgagcatctcagaggctgggccgacggcgctcggaggcgcgtgcgaagatcagccacggatgtcgacgccaccgccagttgcctgggtacgccggcggcgggacgacggggctgggaaggcgctgccgccggctggagattggtggccgggaggagccgcccaacgcagcagcctcggagcatctccttctga

SEQ ID NO: 4579 - DNA, 1869 bp, Zea mays
gaagagttcagctaccctaccatccacactttattcatctcagggcagtagccagtagctagctgtagagggagttatcggccatgtcggaggaggcgacgctggaggacacgcctacgtggatcgtggcgtccgtgtgctccgtcatcgtcctcatctccttcgtcttcgagcgcgcgctccaccacctcggcaaggcactggagcgccggaggaagaccctgtacgaggcgctgctaaagctcaaagaagagctcatgctgctgggcttcgtctcgctgctcctcgtcgtctcccaggacttgatacagaagatctgcatcgacgacagcctcatggagcactggatgccgtgccggggtgcgagcgccaccgcctcggctcattacggtgtctcctcctcctcctcctcctccgcggtcggtggcgggaggaggatgctcaaaggcggcggggcagctttcgggcactgttcaagcaagggaaaagtcccgttgctatcacttcacgccttggagcaggtacacattttcatcttcgtcctagctatcacgcaagtcgttctcagcgtcgccaccgtcctcctgggacttctgcagatgcggatatggatgcactgggagaacaccattcagcaagagggcagctctgctcccaagatgatcgcccgtgtgcagaaaatcaggttcatccaggaccggtgtaaggggtacgagaaggccgcctgggttataatatggctgcgttctttcttcaaacagttctacggatcagtgtccaacgacgactacattgcgatgagactcggtttcgtcatggagcactttagggggcaccccaagttcaacttttacgactacatgatcaaagctctcgagaaagatttcaagcgagtagttagtataaaatggtattactggatttttgtgatgatctttctgctgctcaatgtcaccgggtggcactcctacttctggatctcattagttccactggctctgctgcttctgattgggacgaagctggagcacatcataaacaggctggcctacgaggtggcctcgaagcacgccgccgggcaaggcgaagggggcatcgtggtgagcccttcggacgagctgttctggttccgcagcccacggctggtgctcgtgctcatccacttcatcctgttccagaacgcgttcgagttcgcgtatttcttctggacactggcgatgttcggcgccaactcctgcatcatggacagtctaggatacagcgtctcgcgaatcatcatatgcgtcgtcgtccaggtgctctgcagctacagcacactcccgctctacgccatcgtgtcccatatggggagttcgttcaagagcgctgtgttcgtggacgacgtcgccgacaatctcagagggtgggccgacggcgcccggaggcgcgtgcggagatctgccacgggtgtcgacgccagttgcctgggtacgccggcggcggcgggacggggctgggaaggcgccgccggctggagattgattgccgggaggccgagccgcccaactcagcagcctcggagcatctccttctgagttctgtctagtttctgaagaaggaatcgaaagccgcgcaatctgcagcacgcgtatgctgtcgctgcccgtcttcatttgggtattattgggtttgagttgacactgaccaactgccgaattttgcggaaacttttatggtcatgcctcttgtgccactattacgaccgtggcggtgagcacggagtgtaatagagtagtaaagatatgtagctcgcatatatatatatatactgtacctccgcccgtgatgctagcagtagcagcggcggatggggctctagcggcattgttg

SEQ ID NO: 4580 - DNA, 4641 bp, Oryza sativa Japonica Group
atggcggcgacggaggcgacgacgatcgaggacacgccgacgtggatcgtcgcggcggtgtgctccgccatcgtgctcatctccttcgccttcgagcgctcgctgcactacctcggcaaggtggaccgaacaaatcaagaaccaattaactaaccaagctaattgattgcacatttttgcactgcttatttcagcttcagctcattaatttcttgcaaagctttgcaggcgctggagcgccggaggaggacgctgtacgaggccttgctcaagctcaaagaaggttggcctcgatcggttgattaatcgcgcgctgacactaatgccagaaaaaattaactgaactttttaattcgattcagtttttcttccgaatgtacatctcctgtctgtgtgatccgtagagctgatgctgctggggttcatctcgctgctgctcgtcgtgttccaagagccgatacagaggatatgcatcgccgagagcctcatgggccactggctgccttgccggagcgacgggaaggcgtcgtcgcatcacggcgtcgccgccgcatcggctgccgtcgtctccggtgccggcgcgaggaggctgctcggagaagggacagccggatctgggcactgttcgagcaaggtatattattttctctctcttttgttttaatgtaagttcgagcaaggtatagtttagcttttgtacttttgcttgcgttggaaacgatttcagactctcatgactttggtatagttgttggcttgttgcttagaaggcttttttattgaggccctattcagattggaggaattttgaattttggaggaattgaagtgttttctaagaaaatcctgtaaaatttctacgttttgaaggaaccctaagaaagaagacttcaagctgactgaggtcaacagtcaactgatgctccattgttagggttctacaccgtgcacctaatattatacattaccacaagttaatactagaaaaagtgatgacctccggtatcaaccacaagttaaagtgcatttaatgacaaaccaagtcattacaaaataaacgataattatatgatctttttaatgaaacgatggtcaaatatatgtatcattttgtttggtccataaggactttggcaatgcagagttttttctttcactttttctagaacagatgtgatatgcagtgcctgcacggtttctgtctctcattttgaaacaaattcataaattgagatttgaaataacacatctcttctcatcttgtgtcagggaaaagttccattgctctcgctccatgccatagaacagatacacatattcatctttgttctagccatcacccatgtcgtcctcagcgccgtcaccgttcttctgggacttctgcaggttaggctagctgaaatatagtactccctccgttttaaaatgtttgacactgttgattttttagcacatatttgaccgttcgtcttattttaaaaaaattgtgaaatatgtaaaactatatgtgtacatgaaagtatatttaacaatgaatcaaatgatatgaaaagaataaataattacttaaatttttttgaataagacgaatggtccaacacgtactaaaaagtcaacgctgtcaaacattttaaaacggagggagtatcatatcagcccatgctaatccagtaatcctgttagcatatgctggtccatttctaattttacgtgtccagatgcgaagatggaggcattgggagaacgccatcaaggcagatggagactttggtaggacaattacgatgaatatttattttctttaaaaaaatcaaccttgaatgcaaattaggctcactaggaacacaagaaaatttaggaactatctcctataaactgtgaaacaattgtgcttcaaacgggaaattgatagatcccattttgagatgaatgcatagatgcagctgttctgggaggctgggactatgttggtgtcgcagcataagaaagctagtttattttgccatgatcagctgcaggtcctaagatgatcaacagagcgcagcaattcaagttcatccaggatcggtacaaggggttcgataaagtcaccatggtcataatttggatggtatgcgtgcattaattatgcaatcagcagtactctctttgtcccataaaaaaccaatttaatactggatatgatacattatagtactacgaatctgaacatactagaatgtgtcacatctagtcctagattttttttttttgacggagggagtaggcttaagcctttttgtgttgagcatcacctgatgtattgatcatgtatgtatctctggagtctgaacttcagtaacggtttgcttttttcagcgttctttcttcaagcagttctatggatcggtaaccaaggatgactacacagcaatgaggcttggttttgtcatggtacactgatacaatgcttggcattcattgattcatatgttagccatgtggtcttattgctgtcttctgatcctgaatgcattttatctggttgcgttcatttgttcttttgatcataggaacattttagggggcacccaaaatttaacttttacgactacatgattaaagctcttgagaaggattataagagagtagttggcataaagtaagtttgttctatgtttttcctattatttccgatcgtttatacactgctaattgaaagcatgtattttttttgtaagcaatagcaatacaatccatcagtctctaccaacatcagctacagctgctagctgtattaacagtttaacactgaccatcattacaaactgccactaattactcgttttgctgcaacacagatggtatctctggatatttgtaatgatcttcctcctactaaacatcactggttcgtggcgtgactctgctcatccattcagtaaaaacctgttcctggaacactattcagagatgaaactgaccatgttgcatatgattttctctgtgaaaaggttggcactcctacttctggatctcattaatcccattggttgtaagtagtactacttctttcatatattatgctgcaaacagttatgtacttactactatatggcatttagctatatgcacagtcctggagctagcttactgttcatgttcagaagttcagaatgtgattgcagctgctgctcctgatcggaacgaagctggagcacatcatcactcagctagcctacgaagtggccacgaagcacaccgccgtggagggggacatagccgtgagcccgtcagacaatctcttctggttccacagccccaggctcgtgctcgccctcctccgcttcatcctgttccagaacgcgttcgagtttgcgtatttcatctggacaatggtaagcgtaaaacaaaacgtactccctccgtctcattttaagcgtagttgtgggcttttgtgttcaacatttaactgtccgttttatttaaaaaacttataaaaaataagtcatacataaaatactatttatatttatcatctaataacaataaaaatactaatcgtaaaaaaaattttaaataagacggacaatcaacttggatacggaaacttacaactacacttactcctaagttactccctctgtctcctcctaatataagagattttgatattttacttgcactgtttgatcattcgtcttattcaaaaaatttagaattattatttatttttttgacttactttattatccaaagtacattaagaacaacttttcgttttctatatttgcacaaaatttttgagtcaaacgagcggtcaaatagtataagcaaaatattaaaatcctttatattatactacggaaggagtactatcatgggttatctgacattttcagtttcagtgatcatcgtatctgacatccctgtgcaggcaacgttcggcttcaactcctgcatcatggacaggctgccgtacagagtgtcaagaattgtcatatggtagcaagaaccatcaatttggtttctcctgtttcagattaacaatctcagattcagagattcagttaccatctgttagttacatatctcacgtttatttgcttctttgtcctgtcatgcagcgtcgtcgtccaggtcctctgcagctacagcacgctccccctctacgccatcgtctcccatgtcagtatacataattgacacaattaactttgactttttttaagttaaactttattaagtttaactaagtttatagaaaaaattagcaacattttaaacaccaaattagtttcattaaatttagtattgtattatattttaataataataattgtttgtattaaaaatactactatatttttccataaatatagtcaaacgtaaagaaatttaattagaaaaaaaaccaaaacgacttataatatgaaacagggattacttattctagacatagataagctgatgttttccttttgtccatgcagatggggagttcgttcaagagtgccgtcttctcagacgacgtcgcggacaatctaagaaaatgggccgacgaagctcggcggcgcacaggaagagccgccgccggtgttggctgcctaggtgcggcggcaggatcatcaaggcgggaagggattcacatacaaaacatgt

SEQ ID NO: 4581 - DNA, 1212 bp, Sorghum bicolor
atggctcccctcctcctctctctccctctccgcctccgccccatccccgccgccgccgggagctccacctcgaggatcgcgccgaggccacggtcccctcgccccttccccaggcggcgcctgctcctgcgccttcccgccctccaagcccaagtccaatgcctcgcggcacccgccggaggccccgacgcgccagcgcccacgccgcggtggcacgcggcgctgtccgcggcggcggggctgtacccggcctccgtggccgtcgcgcggcccgaggcgttccggtggttcgtggcgctggcgccggggtcctacaccgccacgctcggcttcatcatgctcgccatgggcctcgcgctccagctcagggacttcgccgccctcctccgcgacaggcccctcgccattctgttcgggtgtgccgcgcagtacgccataatgccggcgtttggcgccatcgttagccacgcgctggggcttcccccgcccctctcagctggactaatcctgctgggatgctgtcctggaggaactgcatccaatgtggtgactttagttgctcaaggtgatgttccattatccatcgtgatgactgtctgcagcactcttgctgcagtgttccttactcctctgttaacaaaaattcttgccggtgcttatattcccgtggatgctgtgaagctctccctcagtactttgcaggtggtggttgccccaattctattaggttcatcgatacaaactgcattcccatcagtagttcaatttgtgactccttttgcacctctgatggcagtcttggcttcatcccttctggcatgcagtgtcttctctgagaactttgtgcgcctaagatcgacaattgccgatgcatcctctgtgagtgggaacttcttctccagggatattggcattgtcatgctctctgtcttcttgctgcattttgctggtttctttgttggttatgcggcagcagctattggtggtttcaaagaaaaacaaaggagagcaatatctattgaggtaggaatgcaaaactcatccttaggggtagttttagcaactgcacatttctcctcacccttggtcgccctccctcctgcactctcagctgtcatcatgaacatgatgggtagcacactaggtctcatatggcaatctatcagcccttctgtttcagagaatgaaaccactgacataaccaatgcatga

SEQ ID NO: 4582 - DNA, 1304 bp, Zea mays
gactcagtagttagtagagaaatactcgtgcgcgcaccacggacaaaaaccaaccaccgtgcgccagccgccacgccagcgcctgccatggctcctctcctcctcctccccctccccctccccctccgacccatccccgccgagaactccatttcccggctcgcaccgaggccaaggttccctcgtcccttctccaggcggcgcctacgccttcccgccctcctccaagtccaatgcctcgcggccaccggccccgccgcgcccgcgccgcggtggcacgcggcactgtccgccgcggcggggctgtacccggcctacgtcgcagccggcgcctccgtggccttcacgcggcccgaggcgttccggtggttcgtggcgctggcgccggggtcctacaccgctacgctcggcttcatcatgctcgccatgggcctcacgctccagctcagtgacttcgccgccctcctccgcgacaggcccctcgccattttgttcgggtgtgccgcccagtacaccataatgcctgcgtttggcgctatcattagccacgcgctggggcttcccccgtcgctctcagctggcctcatcctgctgggatgctgtcctggaggaactgcatccaatgtggtgactttagttgctcaaggcgacgttccattatccgtcgtgatgactgtctgcagcactcttgctgcagtgttccttactcctctgttaacgaaaattcttgctggtgcttatattcctgtggatgccgttaagctctctctcagtactttgcaggtggttgttgccccaattctattaggttcattgatacaaactgcattcccatcagtagctcaatttctgagtccttttgcacctctgatggcagtcttggcttcatcacttctagcatccagtgtcttctctgagaactttgtgcgcctaagatcgacaattgccgatgcatcccctgtgaatggaatgttctttggggatgtagggactgtcatcttctctgtcttcttgctgcattttgctggtttctttgtcgggtatgcagcagcagctataggtggtttcaaagaaaagcaaaggagagcaatatcgatcgaggtaggaatgcagaactcgtccctaggggtagttttagcaaccgcgcatttctcctcgcccttggtcgcgctgcctcctgcagtctcggccgtcgtcatgaacatgatgggtagcacactgggtctcgtatggcaatataccagcacttccgtgtcagagaacgaaaccagtgcgtgatctactcttactgtcgccatgtgctt

SEQ ID NO: 4583 - DNA, 1355 bp, Zea mays
acttcagacttcactctacaatactcgtgcgcgcaccacggacaaaaaccaaccaccgtgcgccagccgccacgccagcgcctgccatggctcctctcctcctcctcctccccctccccctccgacccatccccgccgagaactccatttcccggctcgcaccgaggccaaggttccctcgtcccttctccaggcggcgcctacgccttcccgccctcctccaagtccaatgcctcgcggccaccggccccgccgcgcccgcgccgcggtggcacgcggcactgtccgccgcggcggggctgtacccggcctacgtcgcagccggcgcctccgtggccttcacgcggcccgaggcgttccggtggttcgtggcgctggcgccggggtcctacaccgctacgctcgactttatcatgctcgccatgggcctcacgctccagctcagtgacttcgccgccctcctccgcgacaggcccctcgccattttgttcgggtgtgccgcccagtacaccataatgcctgtgtttggcgctatcattagccacgcgctggggcttcccccgtcgctctcagctggcctcatcctgctgggatgctgtcctggaggaactgcatccaatgtggtgactttagttgctcaaggtgacgttccattatccgtcgtgatgactgtctgcagcactcttgctgcagtgttccttactcctctgttaacgaaaattcttgctggtgcttatattcctgtggatgccgttaagctctctctcagtactttgcaggtggttgttgccccaattctattaggttcattgatacaaactgcattcccatcagtagctcaatttctgagtccttttgcacctctgatggcagtcttggcttcgtcacttctggcatccagtgtcttctctgagaactttgtgcgcctaagatcgacaattgccgatgcatcccctgtgaatggaatgttctttggggatgtcgggactgtcatcttctctgtcttcttgctgcattttgctggtttctttgtcgggtatgcagcagcagctataggtggtttcaaagaaaaacaaaggagagcaatatcgatcgaggtaggaatgcagaactcgtccctaggggtagttttagcaaccgcgcatttctcctcgcccttggtcgcgctgcctcctgcagtctcggccgtcgtcatgaacatgatgggtagcacactgggtctcgtatggcaatataccagcacttccgtgtcagagaacgaaaccagtgcgtgatctactcttactgtcgccatgtgcttaatctaatatgtcgtatctaccaccaccactactacccgaaaaaaaaaaaaaaaa

SEQ ID NO: 4584 - DNA, 3231 bp, Oryza sativa Japonica Group
agccgcccggcgtcgccaaggcgcggcctctcctactcctaccccaggcgcgtcgccgccgtcctgcgacaatgccgcgccgcggcgccgcctccgcctgctcctccggatgccgtgccccggtggcacgcggcgctcgcggctgcggcggggctgtacccggcgtacgtgacggccggcgccgcggtggccgtggcgcggcccgatgcgttccggtggttcgtcgcgctggcgccggggtcgtacacgttcgccctgggactcatcatgctcgccatgggcctcaccctcgagctccgggagttcttggctctcctccgcgagaggcccctctccgtaagcaccccaccccaccctgcaaattttggcactaaatatttctccatttctaggtgtacaattccatggcaatctttcaaatttcaattgtgtccttgaatccaagatcccaaaattgtgactgatccaaaggaaataaattgtgtgttttggccgctgtagatattgtttggttgtgctgcacagtacaccataatgcctgcctttggagcaattgttagccgggtgctggggctctctccaccaatatcagtgggactaattctgctaggatgctgtcctggaggaactgcttccaatgtggtaagattctcaaacttgctcagagaatatgccccatttgagatggatcctcgactggattattgccgcgaactgtctactttattgtggagataaattaaacattttgagaaataaacttaacaaaataatttagaacaagtggtctaagcaatgtagtagaatttgtttttaaagaaaatgtatttttagaggcgtgaagccaggggcggacccagcccagaggcaaggcccggaccggcctatagtatttgttttcataatattagcccatgggatattgggctttcaaccccaggccccgtgccatggcctagggtgcccggggtcggggtccgcccctgcatatagcaaataatacatggctcgactatgagtctatgacccgttttgtactgaaggggaattaaggatcaacacttcaacagacacatagtagtgtaaatcaagaattcaaatgtgcatattatttgaatgttcgagtgttctagcaatttcacagtgccacagtccaatgttgaattttaaatttccaactaggattaagatcaagtgtgctttatgaaggtatatcgactatttaaacgattgattccaacagttaacatatgttttctgagtgccaagaaacacacaattatctagagcaccaagttatttttggtggttcctttaggttatttctacataagacgttctgttattttactttatcttcttggctttatgaaccctgagctctccaagtatatgctgtgtgagtcaaatatgcatgattaaacaaagggtctctcattcaagataaaatcatgatggttggaggcagagtatcccacataggttgtccatgtatgtggatgatgtagttatgttcttcctagcaatattcggggaagcgtcgggtctaaataccaagttcgcaaaattctcggtgtttctgagctgcctagtgtggaattgcccctgtgctgttcatgattcccatgtaccttgggttgcctctgtatgaaaaggcacacaaatattttgcatgctgaaaaaatcatttgtacctggattttctttgttatgtattgacctagttcttccatatagtggttcaggtgactttagttgctaaaggtgatgttccactatcaatcgtcatgactgtgtgcagcactcttggtgcagtgttccttactccactgttaacaaaaattcttgctggtgcttatgttccagtggacgcggtgaagctttccttaagtactctgcaggtgaaatttatgataccactgttcattgtagaatttgaattagcttttatctgacattctcttttctggtttaggtggttgttgctccaattctattaggttcctctatacaaagtgcattcccatcagtagttaaatttgttactccttttgcccctcttctagcggtcttaacttcatcacttctggcgtgcaggtttgagttcttgtaacatgttatgttattggattttgaatagctgaaacagcacgcatttttagttttttttaccatttttttattcttatggacagcgtgttctctgagaactttgtacggctgagatcaacaattgctgatgcatcatatgggaatggaggcctgttttctggggatattggggttgtgatgctgtctgtcttcttgctgcactgtgctggttttgttgtcgggtgagcactggactgtttgctatagttatttttttatatgaaggaattacattggttgtgtgaatagtagaaatttttgtttaagaaaaactgtaagggaacaaatcgtgatgtttcatccttccattaattcaaccaaaatgttatggatgcttgtagtagttagtatctatcatccagatttctgattgtttacataattttaccacgcataggtacacgacagcagctataggtggtttcaaggaaagacaaaggagagcgatatccattgaggtatgcagtctgatcgctaaagctactactagtaatttatcatcgtcagaaatgcagaacatagcattccaaagctaccaattttctatcatcattaaacgtggagtcttattaaaatatatgaaatcacacttccatttagaaaatcagatggtttaaattgcttcggagagatcaacactaaacgtaacaatatctagccattatcaacactgagttactaaccataaaaatatctaaccatttgttataatttaaacagttgcattccccacagtgtaagtttatttctcatactacctttaaatatgtagcattacaaaacaatactattactatggccttgatcatatttatttggtctttgttcagtttataactggcatgaatataatttgtttctggatagttttctccaggatgatgaatattatgcctttttggattgcaggtagggatgcagaattcatccttaggagtagtattagcaactgcacatttctcctcttccttggtcgccttgccagctgcactctccgctgtcatcatgaacataatgggtagcacattaggtcttgtatggcaatttatgacaccgcctgattcgaagaacgaaaaccgt

SEQ ID NO: 4585 - DNA, 1524 bp, Oryza sativa Japonica Group
ggggaattggcacaggcaggagagagaaagagagagagacccataccaatgccaagaacaagaaatcagagagcccaagcaaaaaatccaatccgaatcccctccaaaaacccaccaaacaatctcctccatctccaagaacaagaacaagagagcatcctagaacattaggggataaaggaggaggagaagaagaccaagaaaagtttcgagaggagagggaggagagttcaagaacttggagagaaggggatggatccggtgttgctggacgacatcatccggaggcttatcgaggtgaagaatctgaagccggggaagaacgcgcagctttcggagtcggagattaagcagctctgcgcaacctccaaggagatcttcctgaatcagcccaacctgctcgagctcgaggcccccatcaaaatctgcggtgatgttcatggacagtattctgatctcctgaggctgtttgattatggtgggtatccacctcagtccaactatctcttcttgggcgattatgtggaccggggaaagcaaagccttgagacgatatgccttcttttggcttataagatcaagtaccctgaaaacttcttcctactcagaggcaaccatgaatgtgcatcggtcaaccgcatctatggattttatgacgagtgcaagcgcagattcagtgtaaaactctggaagacttttactgactgttttaactgcttaccagtggcagcattgatagatgaaaagattctttgtatgcacggaggtctttctccagagttgaataagctggatcaaatactcaacctcaaccgccccacggatgtgcctgatactgggttactttgtgatctcctttggtccgatccatccaatgacgcacaagggtgggctatgaatgatcgaggtgtctcatatacattcgggccagacaaagtgtctgaatttcttgagaagcatgatttagacctcatctgtcgagcccatcaggttgtcgaagatgggtacgagttctttgctaaccgccaacttgtaacaatattctcggcccctaattactgtggagaatttgataatgctggtgccatgatgagtgtagatgatacactgatgtgctcttttcaaatactaaaaccagcgaggaaaatgttgggtggttccacgaattccaaatccggcttcaagtcactgagagggtggtgacgatgagcaaagctgtgatctgatctgctggcgcatgtcttctacagcggctgcgactaaccggcattttcgcctacagctcgggtccataaacagcgaagcagatagaaatgtgtacaactttccagccgatggaactgtacatcatcgttcatgttggattaacacttgttgtaatgtattattggttttaccatgcggatctcttatcatatgagaggatgtgaatgaaaactgttctcccgtcctcccccctaaattcagaaaagttcagacagaaggactccaataaaaatagctagaatcgaatgcttttgaacc

SEQ ID NO: 4586 - DNA, 1428 bp, Oryza sativa
gaacattaggggataaaggaggaggagaagaagaccaagaaaaggtactacctttcatctctccctcccccccaaatacacactggtcgcaaaacgagaggccgcctcagccttctccaatcccctcttacggagagcaaagcaagcaagatttttcttcgatctctgctcgagtttcttgctgtgaagtctgttcttttttcttaactgttactgctcgtgcgtttttgagaagtttcgagaggagagggaggagagttcaagaacttggagagaaggggatggatccggtgttgctggacgacatcatccggaggcttatcgaggtgaagaatctgaagccggggaagaacgcgcagctttcggagtcggagattaagcagctctgcgcaacctccaaggagatcttcctgaatcagcccaacctgctcgagctcgaggcccccatcaaaatctgcggtgatgttcatggacagtattctgatctcctgaggctgtttgattatggtgggtatccacctcagtccaactatctcttcttgggcgattatgtggaccggggaaagcaaagccttgagacgatatgccttcttttggcttataagatcaagtaccctgaaaacttcttcctactcagaggcaaccatgaatgtgcatcggtcaaccgcatctatggattttatgacgagtgcaagcgcagattcagtgtaaaactctggaagacttttactgactgttttaactgcttaccagtggcagcattgatagatgaaaagattctttgtatgcacggaggtctttctccagagttgaataagctggatcaaatactcaacctcaaccgccccacggatgtgcctgatactgggttactttgtgatctcctttggtccgatccatccaatgacgcacaagggtgggctatgaatgatcgaggtgtctcatatacattcgggccagacaaagtgtctgaatttcttgagaagcatgatttagacctcatctgtcgagcccatcaggttgtcgaagatgggtacgagttctttgctaaccgccaacttgtaacaatattctcggcccctaattactgtggagaatttgataatgctggtgccatgatgagtgtagatgatacactgatgtgctcttttcaaatactaaaaccagcgaggaaaatgttgggtggttccacgaattccaaatccggcttcaagtcactgagagggtggtgacgatgagcaaagctgtgatctgatctgctggcgcatgtcttctacagcggctgcgactaaccggcattttcgcctacagctcgggtccataaacagcgaagcagatagaaatgtgtacaactttccagccgatggaactgtacatcatcgttcatgttggattaacacttgttgtaatgtattattggttttacca

SEQ ID NO: 4587 - DNA, 1644 bp, Zea mays
gagacccattaccaatgccaagaacaagaaaccagagaggacagccgcgaatacaatccgaatcccctccaaaaacccaccataccgtctcccccatctgcaagaacaagatcaggagagcatcctagggggaagaaacaggagggggaaaaagaagcccagaaagaccaactgaccaaacaaaaaggtggcatctttgtgtcaccgaggcaccgccgatcacagaccaaagcccgctcctctggtccatcccaagcgtacagcagccgagatttcttcgatctgcgcttgcgtttttttttcttgtaaagattttagttttccccccttcaactgttgctagccttgagtcgctgagaagtttcgagaagggtggtgtgagtgtcggatagctcaagatggatccggcgttgctggacgacgtcatacgccggcttctggaggtgaagaatctcaagcctgggaagaacgcgcagctgtcagagtcggagattaagcagctctgcgctgccgccaaggagatcttcctgcagcagcccaacctgctggagctcgaggcccccatcaaaatctgcggtgatgtccatggccagtactctgatctcctgaggctatttgattatggtggctatccgcctcaggccaactaccttttcttgggtgattatgtggatcgtggaaagcaaagcctagaaacaatatgtcttcttttggcttacaaggtcaagtacccggagaacttctttcttctaaggggcaaccatgaatgcgcatcagtaaatcgcatctatggtttttatgacgagtgcaaacgcagattcagtgtaaagctgtggaaaacattcacagactgttttaactgcttgccagtgtcagcattgatagatgaaaagattctctgtatgcatggtggtctatctccggagttgaacaagcttgagcaaatactcaacctgaatcgccccacagacgtgcctgatactggattgctctgtgatcttctttggtctgatccttccaatgaagcaacaggctgggccatcaatgatcgtggtgtttcattcacatttggtcctgataaagtttctgaatttcttgagaagcatgatttggaccttatctgccgagcacatcaggttgtcgaagatggatacgagtttttcgctagccgtcaactcgtaacaatattttcagcccctaactactgtggagaattcgacaacgctggtgccatgatgagtgtagatgatacattgatgtgctcgttccaaatattgaagcctgcaaggaagatgatgggtggttcaactaataacaaatctggcttcaagtcattcaggggatggtgacaacggcctgatggtgggcacgctgcgttcgacagggggtacatcttacagcggctgcaactaacaggcatatgcattttcgcggaaacctgcttgggccttggaagggcaaagcagatgtagaactgtgcatcttccatgttggattaacacttgatgtaatgtattgttatcggatttttactgtgcggatctccttatgatatgggaggatgtgaatgagtactgccctcccctttgcgtcctaagattcggaaagaatccattcgccaataaaaatagccagactattctc

SEQ ID NO: 4588 - DNA, 1189 bp, Ricinus communis
tctcaatcacacccagtagataaccgttgacttttttaagcttttgatatattttttaaatttattactcaccaaaaatcaatttttaaggaaaagaaaaagggaaatggatcaaacggttcttgatgatataatcaaacggctattagaggttcggggcaaacccggaaagcaagttcagctatcggaggccgagatccgacaactctgtgttgtgtctagagagattttcttgcaacagcctaatttacttgagcttgaagcacccatcaagatttgtggtgacatccacggtcaatattctgatcttctaaggctgtttgaatatggtggattacctccacatgcaaactacttatttttgggagattatgtggatcgaggcaagcaaagtctagaaacaatatgtcttctccttgcatacaagataaaatatcctgaaaacttcttcctcttgaggggaaaccatgaatgtgcttctataaaccgaatatatggtttttatgatgagtgtaagagaaggtttaatgttaggctatggaagattttcacagattgttttaattgcctaccagtggcagcactaattgatgagaagattctctgcatgcatggaggtctttctcctgacctgaatcatttggatcagattagaaacttacagcgcccaactgatgtaccggatacaggtttgctttgtgatcttctatggtcagatcctagtaaagatgttcagggttggggaatgaatgacagaggagtttcatatacttttggtcctgacaaggtgacagaatttcttgagaagcatgatttggatctcatttgccgtgctcaccaggttgtggaggatggatatgagttctttgccaaccgacaacttgtaactatattttcagcacctaattattgtggggaatttgataatgctggtgctatgatgagtgtggatgagacgctcatgtgctctttccaaatattaaagcctgccgataagaagtcaaagtttaacttcgggagcacaactacagcaaagcctggaaacacttcaggagttggtatttttgggagtacaactacagccaagcctggaaactctccagcaggagtcaagatctcaagtatctatgtgcttttagtgagcggaagatataatttagatatttccatttttaatgtctggaggtag

SEQ ID NO: 4589 - DNA, 1689 bp, Vitis vinifera
ctcacttctttctctctctgtctcctctctctcccgtactccatttcttttacagcttcgagagagaggttgactttggtggcgttggcggcggcggtggtggtgatcgtgaaatggacccttcagttctcgacgacataatcaatcggcttcgcgaagttcgtcttcgacccgggaagcaggtgcagttatcggagtcagagatccggcaactctgtgtagtttctagggagattttcttaaaacagcccaatttgttggagctatgtgcacccatcaagatttgcggtgatatacatggtcaatattcggatcttttaaggcttttcgactatggtggattccctcctcaagccaattacttatttttgggggattacgtagatcgcggcaagcaaagcctagagactatatgtcttctccttgcatataaaataagatatcctgaaaacttcttcctcttgagaggaaaccatgaatgtgcatctataaaccgtatatacggattttatgatgagtgtaagagaagatttaatgtcaggttgtggaagatcttcactgattgttttaattgtctgccagtggcagcccggattgatgataaaattctctgcatgcatgggggactttcccctgatttgcataatttggatcagattagaaatttacaacgcccaactgatgtaccagacacaggattgctctgtgatcttctctggtcagatcccagtaacgatattcaaggttggggaatgaatgacaggggagtttcttatacattcggccctgacaaagtgacagagtttcttgagaagcatgatctggaccttgtttgtcgtgctcatcaggttgtagaggatggttatgaattctttgcaaaccggcaacttgtaaccatattttcggcgcctaattattgtggggagtttgataatgctggtgccatgatgagtgtggacgacactctaatgtgctctttccaaatattaaaacctgcagttaagaagttaaagttcagctttggaagcactactaccactaagcctggaaattctccagaagtctttgggagcacaactacaactaagccaggaaacactccaactggagtcaagtccttcctcggtgcaaaagtatgagaatttgattttggtgggatacaggagctgccattcaacaattggttcgtggacattgccaaactagctgcaaaagggcactcgaggtccatttaattacagataattgatggaagtgtataaattatgaaaggaaatatcagaaagctaatgcaaaagttttattctccttgatataaagttgggtttgaagaaagaaggctgtaatctcttcgtttcttgtacactaatggttgcttaagctgtttctatgaacaatcgcagtgtgcctttgattcatctttgctccaagactatgaagaaggtcaaaaacattattgccaattcttgtcagttctgggacgacaaaaccgagtcggtagagtttacattttgtggttgttttttctggaaatctttccgtaatttagactatggatgcccagatataaagcctctaacgacttttttgaattttctcatgaatctgagctccctaatccttcagtgcaggaactttggaggaattctcaggacatttctgaatatattatagaaatttaatggtttc

SEQ ID NO: 4590 - DNA, 1548 bp, Glycine max
ttttttttttttttttttttatccatcaatgcttgagaaccttagaagtcagaacgacatataccagctattagtgtacaaaagaaaacaaggagaggctgtccacctcaaaatgcaaatttgtaccagttgaaaacaacggtctacatagttcatgatggtgtttcccttcgtttttacaattccaaaatatcataggagaccaaatggaactctactttccttttcttgcaagtattacaacttcaagaccaagcttaaacttaacttcatacttttgtacccaggaaggactttacgcctgctggagagtttcctggcttagtagtagtagtacttccgaagttgagctttacttttttatcagctggctttaatatttggaaagagcacattagtgtctcatcgacactcatcatagcgccagcattgtcaaactctccacaataattaggtgctgaaaatattgttacaagctgccggttagcaaagaactcatacccatcttccaccacctgatgagcacgacaaataagatccaaatcatgtttttgaagaaactctgagaccttatcagcaccaaatgtatatgaaactcccctgtcattcattccccaaccttggacctctttgcttgggtctgaccagaggagatcacaaagcaaacctgtatcaggcacatcagtgggccgttgcagatttctaatctgatccaaattaagcaagtcaggagaaagacccccatgcatgcacaaaatcttttcatcaatcagtgctgccacaggaaggcaattgaagcattctgtaaatgtcttccataaccttacattgaaccttcgtttacactcatcataaaatccatatatacggttaatagaagcacattcatggttacccctcaaaaggaaaaaattctcgggatattttattttatatgctaggagaaggcatattgtttccaaactctgcttccctcgatccacataatcccccaaaaataagtagttggcctcaggaggtagtccgccatactcaaaaagccttaaaagatcagaatattgaccatgtacatcaccgcaaatcttaatgggtgcttcaagctccaacaaattaggttgctgcaggaaaatctctctggaagcggcacagagctggcggatctccgactccgacagttgcacctgcttgcccgggcggccgcgaacttcgagaaggcggttgattatgtcgtccacaagggcttggtccatttgttcccctcccagaaaaaaagcacaaagtcaatgtctctaatctattgggtgtgatttttacgatgatgaagagtaaaggcagtgagcagcgaatagcatgcctcgacgaccaaaccgcagtcgttttgctagcggaagggaatcgtttgagggtgacggcgtggagtgattgtgaaaattggtttgagtttggtgaggggaagagaggaaaagtgggaattggtttgagaagagggattgatgattttgattattaggttagaggaaggaaactgatttcgtaacactgctatcc

SEQ ID NO: 4591 - DNA, 1014 bp, Populus trichocarpa
atggagcaagcagttcttgatgatataatcaagaggttattagaggttagaggcaaacccgggaagcaggttcagttatcagagtctgagatccgacaactttgtgtggtgtctagagagattttcttgcaacagcctaatttgctggagcttgaagcatccatcaagatttgtggtgatatccatggtcaatattctgatcttctaaggctatttgaatatggtggtttccctcctcatgcaaactacttatttttgggggactatgtggatcgaggcaagcaaagcctggagacaatatgtcttctccttgcttataagataaaatacccagaaaactttttcctcttgaggggaaaccatgaatgtgcttctataaaccgcatatatggtttttatgatgagtgtaagagaaggtttaatgttaggctatggaagacgttcacagagtgttttaattgcctaccagtggctgcgctaattgatgagaagattctctgcatgcatgggggtttgtctccagaactaaaccatttggatcagatccgaaacttacagcgcccgactgatgtcccagacacaggtttgctttgtgatcttctctggtcagatccgagtaaagatgttcaaggttgggggatgaatgacaggggagtttcatatacatttggtcctgacaaggtgacagagtttcttcagaagcaggatttggatcttatttgccgtgcccaccaggtcgtggaggatggatatgagttcttcgcgaacagacaacttgtaactatattttcagcgcctaattactgcggggagtttgataatgctggtgctatgatgagcgtggatgagaccttgatgtgttcttttcaaatattaaagcctgctgataagaaatcaaagtttaaggctggaaacacttcaactggagctggtctttttgggagcacaactacagctaagcctggaaaccctcttccaggagtcaaggtaaatgcattacttagaaagacatga

SEQ ID NO: 4592 - DNA, 1753 bp, Zea mays
cccgcttcaggttccattcctcatcaccaagccgaaccacagagctcccccacacccacagcggggtgaagcgaatcgcatcaaattcgaccgaagaatcgcgccgctcggcccggccaccatgagcttctcgtccatgagcaagcagcaggtgctggacgccggtgacggggagggggaggaggtcatggagctcatcccgggcctgccggaggaggtggccgagaagtgcctcctccacctgcccttcctctaccaccgcctcttccgcaccgtctcctccacctggaaccgcttcctcacggacgccctggccaagccactgctgttccctcacgcggcgggggcggggaccgcggccacggggtcggtgcccttcctcttcgccctcgcctttgaccccatgtcgcggcgcctccagtgccaggcgctcgaccgtttctcgaggaagtggctcctgctcccgccggtgcccggcggcgccgcggccgggtcgttcgcggtggtggggctcccccgccgcggccagatctacgtgattgggggcgtcgaggagggcggcgacaaggccgtgacgagcgtggcggtgtacagcgccgcgcggaacgggtgggaggaggcggcggcgatgcggacgccccgcgggtacatggcggccggggaggtgggagggcgggtggtggtggccggggaggacggcgaggcggaggtcttcgacccggaggccgggcggtggtcgccggccgcgccgcgccgcggcgccgccgtggcgcggtacgacgcggcggcggcgggcgggaagctgtacgtgacggagggttgggcgtggccgttcgagcgcgcgccgcgcggcgccgtgtacgacgccgccgcggactcgtggtgcgagatggcgcgcgggatgcgggaggggtggacgggctcctgcgccgtcgccggcggccggatgtatatcgtggcggagtacggggagtggcggctgaagcggtacgacgaggcccgggacgagtggcggatggtggccggcaccggggtgccccccgaggtgcgccggccgcacgtggtcgctggcgagctcggggaggtcgctggcgggaggcggaggatatacgtcgtcggcgccgggctcgacgtcgccgtgggcacggtttctgccgccgcatccgccgccgccgcggtacccggcgtcgaggacgaagtggtggagtgggaggtggtcaagggctccgccgagttcgccgggatggcgccctgcaacgcgcaggtcctatacgcttgaggcgccgccggaccccgccttcgggtagaacgtccgcaaaccgatggttcggtaccagtcggcgcacccacaggggtccaccagccccgtgccgcatcacgtcgccggcgaagcgcatacctagcccacatgtcagtggaacgcgacggctcccgctccatcgtctcgccggcaggagcgagtggcttgctgttcctgttcctgctaggagagaagtatatagatgacccagaagaaaccagatgcgcaaacgcagctgcacaggctcgcaagtcgcaacgtggtggtctggtggacgagtgtgtgaaccgtgagcgagcattgatggcactagagaaaggctgaaaaatcttttcttccatgtggggccgaggaagtgtgcaagcagtagaacttatttttcttttcaggcttttttttacctgtgtatattggattttggtaaagactttatttgcgttcgtcgcaatgcac

SEQ ID NO: 4593 - DNA, 1732 bp, Zea mays
caagccgaaccgagaccgagagagcttccccacacccacagcggggtgcagcggatcgcgccaaattcgaccgaacaatcgcgcgccactcggccccgccactatgagcttctcgtccatgagcaaacagcaggtgctggacgccggtgacggggagggggaagaggtcgtggagcttatcccgggcctgccggaagaggtggccgagaagtgcctcctccacctgcccttcctctaccaccgtctcttccgcaccgtctcctccacctggaaccgcttcctcaccgactcccctgccaagccgctgctgttcactcccgcggagggggcgggggctggcgcggggagcgcagccatgggctcgttgtccttatcgctgcccttcctcttcgccttcgcgtttgaccctgtgtcgcgacgcctccagtgccaggcgctcgaccctttctcgaggaggtggctcctgctcccgccggtgcccggcggcgccgcggccgggtcgtttgcggtggtggggctcccccgccgcggcgagatctacgtgattgggggcgtcgaggagggcagcgacaaggcggtgacgagcgtggccgtgtacagcgccgcgcggaacggatgggaggaggcggcggcgatgcggacgccccgcgggtacatggcggctggggaggtgggagggcgggtggtggtggccggggaggacggcgaggccgaggtgttcgacccggatgccgggcggtggtcgccggctgcgccgcgccggggcgcggcggtggcgtggtacgacgcggcggcggcgggtgggaagctgtacgtgacggaggggtgggcgtggccgttcgagcgcgcgccgcgcggcgccgtgtacgactccgccacggactcgtggtgcgagatggcgcgcgggatgcgggaggggtggacgggctcttgcgccgtcgccggcggccggatgtacatcgtggcggagtacggggagtggcggctgaagcagtacgacgaggcccgggacgagtggcggatggtggccggcagcggggtgccccccgaggtgcgccggccacacgtcgtcgccggggagatcggggaggtcgccggtgggaggcgaaggatatacgttgttggcgccgggctggacgtcgccgtgggcactgtttcggcctcagacaccgccgcggcacccggcgtccacggcgtcgaggaggaagtggtggagtgggaggtggtcaagggccccaccgagttcgtcgggctcgcgccctgcaacgcacaggtcctctacgcatgacccagccttcgggtagaacaaacatctgcatcgccgaaccaagacgtttcggcccactccgcgcacccacacgggtccacaagccccgagccacatcacgtcgcccctggctggtccacatgtcagtgaaacttgactgctccagcgtctcgccggcaggagcgagtgccctgctgccagactgcccagatggattttccggatgcgcaagcacatgtattcacagtcacaggcagcacagtctcgccacgtgggaccagtctgtgagcgagcagtgatgggacttggaagaggctgagaagtcttttccacctcggggaaaggacaaaggaggaagcgagcaggcaggacggattatttttctttccgttttgatttgaggtttttcttgtacctgtgtatatattatatattggtattgtattttgagaaacaatggagaag

SEQ ID NO: 4594 - DNA, 1650 bp, Sorghum bicolor
atgagcttctcgtccatgagcaagcagcaggtgctggacaccggcgatggggagggggaggaggtcatggagctcatcccgggcctgccggaggatgtggccgagaagtgcctcctccacctgcccttcctctaccaccgcctcttccgcaccgtctcctccacctggaaccgcttcctcaccgacgcccctgccaagccgctgctgttccctcccgccgccgcgggtcctggggccgggaccgcggccacggggtcggtgtccttctccctgcccttcctcttcgccttcgcgtttgaccccgtgtcgcggcgcctccagtgccaggcgctggaccctttctcgaggaggtggctgctgctcccgccggtgcccggcggcggcgccgcggccgggtcgttcgcggtggtggggctcccccgccgcggcgagatctacgtgatcggcggagtcgaggaaggcggcagcgacaaggcggtgacgagcgtggcggtgtacagcgccgcgcggaacgggtgggaggaggccgcgtcgatgcggactccgcgcgggtacatggcggccggcgaggttggagggcgggtggtggtggccggggaggacggcgaggccgaggtgttcgacccggaggccgggcggtggtcgcccgccgcgccgcgccgtggcgcggccgtggcgcggtacgacgcggcggcggccggcgggaagctgtacgtgacggaagggtgggcgtggccgttcgagcgcgcgccgcgcggcgccgtgtacgacgccgccgcggactcgtggtgcgagatggcgcgcgggatgcgggaagggtggacgggctcctgcgccgtggcgggcgggcggatgtacatcgtggcggagtacggggagtggcggcttaagcggtacgacgagggccgggacgagtggcggatggtggcaggcagcggggtgccacccgaggtgcgccggccccacgtcgtcgccggcgaggtcggggaggtcgcaggcgggaggcggaggatttacgtcgtcggcgccgggctcgacgtcgccgtgggcactgtctctgccgccgccgccgccaccgcggcacccggcgtcgaggaggaagtggtggagtgggaggtggtcaagggccctggcgagttcgccgggctcgcgccctgcaacgcgcaggtcctctacgcatgaggcaccaccgccggaccccccccccccttcgggtagaacgtctgcatcgccggaccgaggaccgacgcttcggcccagtcggcgcacccacacgggtccacctccaccagcccagcgctgcatcacgtcgccggcgaagcgccgagctggcccacatgtcagtggaacgtgacggctccagcgtctcgccggcaggcaggagcgagtggcctgatggattttccgaagaaaaaaaataaaatggaaaacagaagcgcaagcgcaggtgcacaggctcgccacgtgggaccagtgtgtgagcgagcagtgatgatgggacttggccacttgctagaggctgaaaagtcttttccgccacgtgggaccgaggaagcgtgcaagctgtagaaattatttttctttctcttttgaggcttttcttgtactaccagtgtatatattggtattgtatttttgaaggaaacggag

SEQ ID NO: 4595 - DNA, 1544 bp, Hordeum vulgare subsp. vulgare
gacaatcctccattcccagaccacagccagagcacgctcagagcaacgctccccgcaaagccgcaccaagaacgccgtcccgcagcgcgcgatgagcttctcgtcggcgtgcaagcagcaggtgctgggcgccggcggcgaggaggcgagggaggacgaggcggtgatggagctcatccccggcctgccggaggaggtggccgagaagtgcctcctccacctccctttcctctaccaccgcctgttccgcaccgtgtcctccaactggaaccggttcctcaccgacgcgccgggggccgccaaggcttcgaccccgccggcggcgacggcgacggtctcgctgtctctgccgttcctcttcgccttcgccttcgaccctgtctcgcgccggctccagtgccaggcgctcgaccccttctcccgccggtggctgctgctgcccccggtcccctgcggcgcggcggccggctcgttcgctgtcgtggggctccccgctcgcggcgagatctacgtgatcggcggcgtggaggagggcggcgacaaggcggtgagcagcgtgtcggtctacagcgcggcgaccaacgggtgggggcaggtggccggcatgaggacgcccaggggctacatggcggccggcgaggtgggcgggcgcgtggtggtggccggggaggacggcgaggcggaggtgttcgacccggaggccgggcggtgggcgcaggccgcggcccggggcggcgcggccgtggcgaggtacgacgcggcggcggccggcggcaagctgtacgtgacggaggggtgggcgtggccgttcgagcgggcgccgcggggcgcggtgtacgaggcggcgacggactcctggtcggacatggcccgcgggatgcgggaggggtggacgggctcctgcgccgtgtcgggcggccggatgtacatcgtggccgagtacggcgagtggcggctgaagcggtacgacgaggcgcgggacgagtggcggatggtggccggcggcggggtgccgcaggaggtgcggcggccgcacgtggtggccgggcagctggaggaggtcggcggcggcaggcgcaggatctacgtggtcggcgccgggctcgacgtcgccgtcggcaccgtcggcgcggcggcggaggaggaggagcgggtggagtgggaggtggtcaagggccccgccgagttcgtcgggctcgcgccctgcaacgcgcaggtcctctacgcctgaggcgccggcgccggcgccgttcaccggcggggaaaaggaaggaaggcagaccctgggcccgcacgtcagctactatcgcccctgccaccagcgagctagctcactgctgacgccgctcgaggcaggctctgcagccgagccgagcgcacggacgggccccgtgcgtcagcgacaggagcgagtgctgccgaacgcgccctttaattttccttgctgaggaagcgtgcgtgcgtgcgtgcgtgtaaagagcgaaatgattatacctgcaagaaatggctcgtagcagtccgtccaccagactttatttcccgtt

SEQ ID NO: 4596 - DNA, 1861 bp, Oryza sativa Japonica Group
atcatccacaaactcccctaaaaatttcccccccaaaatacaccaccacccgaattaattaaaatcgcgcccaattaatcatttaatccatccccacgaaacccaccaccatgagcttctcgtcgtcgatgagcaagcagcaggtgctcgaagtcgccggcgacgaggtcggcggcggcggcggcgaggaggtcatggagctcatccccggcctccccgaggaggtcgccgagaagtgcctcctccacctgccgttcctctaccaccgcctcttccgcaccgtctcctccacctggaaccgcttcctcaccgtctccccggccaagttcccgtccgcggccgcggcgtcggtgtcgctgtcgctgccgttcctgtttgcgtttgcgttcgacccggcctcccggcggctccagtgccaggcgctcgacccgttctcgaggaggtggttgctgctgccgcccgtgcccggtggcgccgccgcggctgggtcgttcgcggtggtggggttaccacgccgaggtgagatctatgtgattgggggcgtggtggaaggcggcgacaaggccgtgaggagcgtcgcggtgtacagcgcggcgaggaacgggtgggaggaggcggcggggatgggcacggcgagggggtacatggcggcgggggaggtgggggggaggttggtggtggccggggaggacggggaggcggaggtgttcgacccggaggaagggaggtgggcccccgcggcggcccggcgtggcgcggccgtggcgaggtacgacgccgcggcgtcgggggggaagctgtacgtgacggaagggtgggcgtggccgttcgagcgggcgccgcgcggcgcggtgtacgacgcggcgtcggactcgtggtcggagatggcgcgcgggatgcgggaagggtggacgggctcctgcgccgtcgccggcggccggatgtacatcgtggcggagtacggcgagtggaggctgaagcggtacgacgagccgcgggacgagtggaggatggtcgccgggagcggggtgccccccgaggtgaggcgcccccacgtcgtctccggcgaggtcgaggaggtcggcagcggcggcaggcggcggatatacgtggtgggcgccggcctcgacgtcgccataggcacggtctccccttctccggccatccacggcggcgacgacgagagggtggactgggaggtcgtcaagggccccgccgagttcgccggcctcgccccgtgcaacgctcaggtcctctacgcctgaactccccgccgccgccgctgccgctcgccggtggcgcgtcgcatcgccggggaccccgctttttccgggcccacctgtcagtgagacccctccacccacgcgggcccacctggcagaagcacgtgacgatgcttcccgctgctcactgctgacgcccatccacgggcgaaatcacacaggcactgccttggcacgggacccacctgtcagtgactccgaatcgggggctaaatggtcttttcacccccgctgtccatctctgcatctcaattctatcttgtcagaggagcagaggacggaggaatggagcgtgcgtctctgtaaaacttaaataccacccatatttaattaattactcctactagcagtagtattagattcttcatgtaccactagtatatttgcaaatatttgcacgaggttttgaacaaacgagaaaaaagtggtgaagatcgatgacgtcgacagcactactgaatgaatgaacaaagtggggaaaaagaaaagaaaaataattcaaaccccatttcatttcgttcactaaggcaaagtacttaccaataagatggtgaagaaagaatgttttgttcccagcc

SEQ ID NO: 4597 - DNA, 1828 bp, Zea mays; identical to SEQ ID NO: 1580

SEQ ID NO: 4598 - DNA, 1259 bp, Zea mays
aacaacttgggcgcgcgcgcggccgggtagcaaaagctcgcgatctgtgcgcccaccaccgggaggagcgaagatgcggatgagctgcaatggctgccgcgtcctgcgcaagggctgcggcgacgcctgcaccatccgcccctgcctgcagtggatcgaggcccccgaggcgcaggccaacgccaccgtcttcctcgcaaagttctacggccgggcgggcctgctcaacctgctcgccgccgcgcccgacgacggcgtccgccccgcggtcttccgctccctgctctacgaggcgtgcggccgcatcgtcaacccggtctacggctccgtcggcctgctctggtcgcgccagtggcacaggtgcgccgacgccgtcgaggccgtgctcaggggggaccccgtcgtgcaggtcgacgccgggtccgacgccgccgctgccccgccgctgctcgccggcgccaggccgccgccgccggccgccttcgacatccgccacgtccccagggatcccgacgccaccgccgccgacctcctccgcgccggccgcaagaggttcaagcgcgcgggttcgtcttccaacgcctccaaggcgaagcccctgcccctcgagctcgagggcaaggccggcaacaacgaacgcgcgtcgcccagccctcccccgacgcaacaacgagaggcggaggagctgcagccggtgccgatggtcgtcgagccagaacacggcgaggagtccgccggcagccacgaccaccacctgcagctgcaggggtggtcggaggaggacaccgacgtggaggcggcctcacacgtgagccaagccgaggctgagccgccagccagcagccagagccaggtgctggtagcggatcaggaggaagaggaggttgggctcgagctcacgcttgggttcgagcctgtcgtcaggcagcagccgaggtcgtcgcgctgcgacaagagcggcttgagcgcggcatcgagcctcatcggcctgcggctgcagctgccggccgcctaagcacaggcacagctcgcacctaaacgaatagagcagttttgcgaccctgcgcctgcggtgtttgcttaaaaataagcttttggacccccgggtgccaggagacacacagtagccaacttcaaattttctaggttttgtttatctttttcaatttttcttcttgtctttaactgtaaaagttgatggactgcacaattactcaggtagagggggtttggttccccgatcaaaaaaaaaaaaaaaa

SEQ ID NO: 4599 - DNA, 1267 bp, Zea mays
caacaacttgggcgcgcgcgcggccgggtagcaaaagctcgcgatctgtgcgcccaccaccgggaggagcgaagatgcggatgagctgcaatggctgccgcgtcctgcgcaagggctgcggcgacgcctgcaccatccgcccctgcctgcagtggatcgaggcccccgaggcgcaggccaacgccaccgtcttcctcgcaaagttctacggccgggcgggcctgctcaacctgctcgccgccgcgcccgacgacggcgtccgccccgcggtcttccgctccctgctctacgaggcgtgcggccgcatcgtcaacccggtctacggctccgtcggcctgctctggtcgcgccagtggcacaggtgcgccgacgccgtcgaggccgtgctcaggggggaccccgtcgtgcaggtcgacgccgggtccgacgccgccgctgccccgccgctgctcgccggcgmcaggccgccgccgccggccgccttcgacatccgccacgtccccagggatcccgacgccaccgccgccgacctcctccgcgccggccgcaagaggttcaagcgcgcgggttcgtcttccaacgcctccaaggcgaagcccctgcccctcgagctcgagggcaaggccggcaacaacgaacgcgcgtcgcccagccctcyyccgacgywacaactraccgaggcggaggagctgcagccggtgccgatggtcgtcgagccagaacacggcgaggagtccgccggcagccacgaccaccacctgcagctgcaggggtggtcggaggaggacaccgacgtggaggcggcctcacacgtgagccaagccgaggctgagccgccagccagcagccagagccaggtgctggtagcggatcaggaggaagaggaggttgggctcgagctcacgcttgggttcgagcctgtcgtcaggcagcagccgaggtcgtcgcgctgcgacaagagcggcttgagcgcggcatcgagcctcatcggcctgcggctgcagctgccggccgcctaagcacaggcacagctcgcacctaaacgaatagagcagttttgcgaccctgcgcctgcggtgtttgcttaaaaataagcttttggacccccgggtgccaggagacacacagtagccaacttcaaattttctaggttttgtttatctttttcaatttttcttcttgtctttaactgtaaaagttgatggactgcacaattactcaggtagagggggtttggttccccgatcataaaaaaaaaaaaaaaaaa

SEQ ID NO: 4600 - DNA, 1294 bp, Sorghum bicolor
atgcggatgagctgcaacggctgccgcgtgctgcgcaagggctgcagcgacgcgtgcacgatccgcccgtgcctgcagtggatcgagacacccgacgcgcaggccaacgccaccgtcttcctcgccaagttctacggccgcgcggggctgctcaacctgctcgccgccgcgcccgacgacgccgcccgccccgccgtcttccgctccctgctctacgaggcgtgcggccgcatcgtcaacccggtctacggctccgtcggcctgctctggtcacgccagtggcacaagtgcgtcgacgccgtcgacgccgtgctccggggacaccccgtcgtgcaggtcgacgccgggtccgccgccgccgccgccccgccgctgctcggcggcggcggcgccggcgccaggtctgccgccgcgccggccgctgcctacgacatccgccacgtcgtcaaggatcccgacgctgccgccgccgctgacctcctccgcgtcgcgcgcggcggccgcaagaggttcaagcgcgcgggctcgtcgtctgacgcctcctctgagggcaaggtcaagcccctcaagcccaaggccgaggccggctgcaacgagcgcgcgtcgctgtcgcccagccctcctctgaagcggcaagaacaagaggcggaggagatggaaccggtgcccatggtcgtcgagcttgagcacggcgaggagtcagccggcagccatgaccaccaccacctgcagctgcagcaggggtcgtcggaggaggacaccgatgtggaggcggcctcccacgtgagccaagccgaggccgagccgccggtcagcagtcacagccagagccaggtgctggtagcggcggatcaggaggaagaagaggaggttgggctggagctcacgctcgggttcgagccggtcgtcaggcagcagccgaggtcttcctgctgcgaccgcagcggcttgagcgcggcatcgagcctcatcggcttgcggctgcagctgccagccgcctgaggagagcgagccacatctcatctcaccgaacaaagagagcagttttgcgatcctgcggagttttttctttttttaaaaaaaaaaaagttttggaccccgcggtgtcaggagacaaatagcagccgacatcagatttcctaggtttcgtttatctttttcattttttttttggctggctgtaattgtaaaggctgatggacttgtttcttgcgtcctgtacggctgtgcccatgtgatgtacatgtgtactcgcttgttggccaggatatgcgaagcgttcgttactctacat

SEQ ID NO: 4601 - DNA, 4068 bp, Zea mays
cacggaaggctacaacatggaaagaatttgccctggaagcatcttgctgtagagattacactgatcttgggaagatgctcctcaaatttcaaaatatgattcttcctgactgcataagctgtgaatgggtacaaaattctattgagacgtggaatcaaaagtgtatgaacgcacatgatgccgagactattgaaatgctttgtgaggaacttcgacagtccattcttgggaacaagcttaaggaattgcgggatgcatcagtgcagcctgaattagtccctgagtggaagacgtggaaacaagaattgctgaaacagtacttttcattacatcctgctggtaatgttggcaacttcgagaaaactaattgttacgacgatccagctttagatcaacaaggtagtagaaagcgtccaaaacttgaggttcgaagaggagagatccaaattttacacatgggtgaagctgactacaggactccaactgaggacccaaaccaaaataagcttcctagtaactctgtcatgcatgaaaatataggggcattaggagcaacaagtcaaaaaaatgctgtcatgttccctggaagttctggcaccaatgagaatacaatatctggtagttccaatgcagctttacagaatgctagacttgatttagattcattcaagagctctcggcagtgttctgcgtacattgaagcaaaggggaggcagtgtggtaggtgggcaaatgatggtgatatttactgttgtgtgcatcaaagtatgcattttcttgatcattcttcaagggaggataagacacttaccattgaagctccattgtgtagtggtatgactaacatgggtagaaaatgcaagcatcgagctcagcatggttctactttttgtaaaaagcaccgcctacagacaaacttggatgtaatgcacccaggaaatttgttggatccatctgaggtactccatatgggcgaagaacctccgaataagtgggtggaaggaatttctaagtcgcaagcattgtatagcatagacttagaaacagacaaaaatgtccaggctgttgtacaagtgaaactgatgcccactgtggctatagagaactctggtgaaaaaggttgtgcaatggagaaaactgatatgtgtgctgcgtcaacgtccatgacaaatactgatgatacttctctttgtattggaattcgctctcatgacagtattgttgaatgccaggattatgccaaacgacatactctttattgtgagaagcaccttccaaagttccttaaacgtgccaggaatggaaagagtcgactcgtttctaaagatgtctttgtcaatctgttgaagggctgctcatcaagaaaagataagatatgtttacaccaggcttgcgaatttctttattggttcttgagaaacaacctttctcatcaacgcaccggtcttgctagtgaacatatgccccagatactggctgaagtgtcgaaaaatccagattttggagaatttttgttaaagttgatatctactgagagagagaaactagcaaatatctggggatttggtacagatagatctaagcaaatatattctgaaaacaaagaaggatctgtagcgttgcaggaagagaaaactaatctttcatctggtcctaagtgcaaaatctgtggtcaccagttctctgatgatcaagctcttggattacattggacaactgtccacaaaaaggaagcccggtggctgtttagaggttactcttgtgctgcatgcatggaatcatttaccaacaaaaaagtccttgaaagacatgtacaggatgtacatggggctcaatacctccagtattcaattctcattcgatgtatgtcatgtaacagcaattttttgaacactgatctgctataccctcacattgtttccgaccatgcccaacagttcaggcttcttgatgtccctcagcgaccaagtggtcaatctgctcaacaaacagaagggatgagtggtctgcccctttatgatagccacaacgttgaggatgaaaatggctcacagaagtttgtctgcagattatgtgggctcaaatttgatcttctgccagatcttggccgccaccataaagtcgctcatatggtctcaggtgctgttggccacattccactgggccgtgggaagtaccagcttaaccgcggccgacactactattccgctttcaagaaaagtttgcgaccaacaagtacattaaagaagagcagtagctctggaatcgataaaaatttgaagtttcagatctctggcttaacatctcaaatagttgaatctgaaacatccagccttggtaagttacaggatttccaatgcttagatgttgcacaaactttattttccaagattcaaaagacaagaccccatccaagcaactttgatgttttatcggttgcccgctctgtatgctgtaagacaagtcttcttgctgcgttggaagttaaatacggacctttacctgagaacatatttgtgaaagctgcaaagctttgcagtgacaatggcatccaaattgattggcatcaagagggattcatatgccctaaagggtgcaagtctagatataattcaaatgctctgcttcctatgcaactcacggcagttgattttcttgaagctcctgttgattcccgtaatgatgatgaaatgtggggaatggaagaataccattatgttcttgattcaaagcacttcggatggaagcctaaaaatgagagtgttgttctctgtgaagacataagctttggcagggagaaagttccaattgtctgtgtcattgatgtggatgcaaaagattctttaggtatgaagcctgaagaacttttgccacatggcagttctttgccttgggaaggatttcactatatcacaaaccgtgtgatggattcatctcttattgattcagagaactctatgcctgggtgtgcatgttctcatcctgaatgttctcctgagaactgtggtcacgtgagtctctttgatggtgtctacaatagcctggtggatatcaatggaacaccaatgcatggcagatttgcatatgatgaagatagtaaaattattttacaggaagggtatccaatatatgagtgcaattcatcatgtatttgtgactcgtcctgccagaataaagtattgcagaaatggctgcttgttaagttggaactctttagaagtgagaataagggttgggctattagggctgctgaaccttttctacagggtacctttgtctgcgagtatattggtgaagttgtgaaggctgacaaggctatgaaaaatgcagaaagtgtgtcatcaaagggtgggtgcagttacttgtttagcattgcttcccagattgatagggaaagagttcggactgtaggggctattgaatactttattgatgccacaaggtctggaaatgtttcccgttatattagtcacagttgttccccgaatctcagtacccggttggttttggtagagagcaaagattgccagcttgctcacattggattgtttgctaatcaagatattgccgtaggagaagaactcgcctatgattaccgacaaaagcttgtagcaggcgatggctgcccatgccattgtggaactaccaattgccgaggccgtgtctattgattttgcaggaatacactaactgttcaatgctcggttgcagaactccagagatttcaacagttgtgtaggcttgctgagcgatttagcattgcaattttcctacagcttgagtgcagggctaggatctcattgttaatgctacaaatagtgattgtgatataggactcaggcaagcattaggcaataacatagtgtcgattttagtcatggtaccatcatgtttaactgattatttgttagaagcagcctgaaatgaaactgattcaggctgctctgttcgtaggcgagaattctctctgtaaaattccttcattcatattttatggttcatgagcaccatcattgacgtgaagtaataaactagttatcccagtggccaaaaaaaaaaaaaaaaaaa

SEQ ID NO: 4602 - DNA, 1225 bp, Oryza sativa Japonica Group
aatctctctcctctctctctctctccagctcgcctccccctcgccggcgacgagctctcccccggctagggttagaccaggtgcccctcttgtctgcggcggaggaggtgggaggaaggatggaggagtccgtgggctcgcgcggcggcggcggcggcggcctggacgcccagatcgagcagctcatggagtgccgcccgctctccgagcccgaggtcaagacgttgtgcgagaaggcgaaggagatattgatggaagaaagcaacgttcagccagttaagagcccagtcacaatttgtggtgatatccatgggcaattccatgatctagtagagctctttcggattggtgggaagtgtccagatacaaattatttgtttatgggagattatgtagatcgtggctactattctgttgagactgttacacttttggttgcactgaaggtgcgctacccacagcggattacaatccttcgtggaaaccatgagagtcggcagatcacacaggtgtatggattctacgacgaatgcctacgaaagtatggaagtgcaaatgtctggaagatcttcaccgatctttttgactattttccattgacagcattggttgaatcagagattttctgcctccatggtggtttatcgccatcaatcgacaatcttgatagtgttcgcagcttagatcgtgttcaagaggtccctcatgagggaccaatgtgtgatcttctatggtctgacccggatgatcgatgcggttggggcatatctcctcgtggtgctggctacacttttggccaggacatatcggagcagtttaaccataccaataatctcaaacttgtagcccgggctcatcaattagttatggaaggatataactgggcgcacgaacaaaaggtcgtgaccatattcagtgcacctaattattgttatcgctgtggcaacatggcatccatcctggaggttgatgactgcaggaatcacacatttattcagtttgaaccagctcctaggagaggtgaaccagatgtgacacggagaacacctgattatttcctttaaattatctgttgtaatttgtattgttttgtttcttttgtttctctaagaccgcaatagtgagtgctggtcagtaaaattttgttggatccctttggtaactaaactggccagcgatagcatgagaatgccgatgcccaaaaaaaatgtgaaacttatgcccc

SEQ ID NO: 4603 - DNA, 1540 bp, Hordeum vulgare subsp. vulgare
gggggaattggcacaaggagagagaaagtgacagagagaggtagagagagagagggagaggggggagaggagaccctgaccaatgccaagaacaagaagagatcagtgagaaggccaggcgaaaatccccaccgggcgagaggagacgaccaccggcctcctccgagaacaagagcaagaacaagaaggaatccatcccggagcatccacgagggaataaagccggaaaggcaggccgaggaggagaaaaaaaagctcttccggcgatggagaaggggatggatccggcgctgctggacaacatcatcgccaggctgctggaggtgaagagcctcaagcccgggaagaacgcgcagctgtccgagtcggagatcaagcagctctgcgccgcctccaaggagatcttcctcgcgcagcccaacctcctggagctcgaggcccccatcaaaatctgcggtgatgttcatggtcaatattctgatctcctgaggctctttgaatatggtggatatcctcctcagtccaactatcttttcttgggcgattacgtggaccgaggaaagcagagccttgagacaatatgccttcttttggcttataaggtcaagtatcctgagaacttctttcttctaaggggcaaccatgaatgtgcatcagtaaaccgcatctatggattctatgatgagtgcaagcgcagattcagtgtaaaactctggaaaacgtttacagactgttttaactgcttaccggtatcagcattgatagatgaaaagattctatgcatgcatggaggtctttctccagagttgaacaagctggatcaaatactcaacctcaatcgccccacagatgttcctgataccgggctactttgtgaccttctttggtccgatccttccaatgaagcgcaagggtgggctatgaatgatcgaggtgtctcatatacatttggacctgataaagtggctgaattccttgagaagcatgatttagacctcatctgccgagcccatcaggttgttgaggatggttacgagttctttgctgatcgtcagctagttacaatattttcagcgcctaattactgtggggaattcgataatgccggtgccatgatgagtgtagacgagacgctgatgtgctccttccaaatactcaaacctgcaaggaaaatgttgcctggttcgactaataacaagtctggcttcaagtcaatgagaggatggtgacggtggcacggcgattggtgagcaagctgtggtctgatctgctggcaggcacgtgcctaccatgagcggctgcgactaaccggcgttttcgccgacagctcgggcccggaccgggacaagaacgcagattgtacaactctctcgtcgatggactgtacatcgttcatgttggattaacacttgttgtaatgtattattgtttttctaccgtgcggatctctttatcgtgaatgaaactgtttctcctcctcccccccttccaaattcaaagggatcagacaggctacgccaataaaaacagctaagagtcc

SEQ ID NO: 4604 - DNA, 1357 bp, Vicia faba
ggtctcttgaatgaatgaaacccaaacttctcactccgtagacctccaacgacaccgtttcgctatcaaaacgacggtgttttcctcgttttcatcgtcatagtatcgtcgttttcattcggcaagaatggagcaagcggttttggatgacataatcaatcggctccttgaagttcgtagccggcccgggaagcaggttcagttgtcggaggcggagatccgtcagctctgtgcagctgccagagagatttttttgcatcaacctaatttattggaacttgaagcacctattaagatttgtggtgacatacatggtcaatattctgatcttctaaggctttttgagtatggtgggttacctcctcagtccaactacttgtttttgggtgattatgtggatcgagggaagcaaagtttagaaacaatatgtcttctcttagcatataaaataaaatatcctgagaatttttttcttttgaggggaaaccacgaatgtgcttctattaaccgtatatatggattttatgatgagtgtaaaagacggttcaatgtaagggtatggaaggtgtttacagattgcttcaattgcctccctgtggcagctctcattgatgaaaagattttgtgcatgcatggcgggctttctcccgacttacataatttggatcaaattagaaatttacagcggccgactgatgtgcctgatacaggtttgctttgcgatctcctgtggtcagaccctagcaaagaagttcaaggttggggaatgaatgacaggggagtgtcatatacatttggtgctgataaggtctcagaatttcttcagaaacatgatttggatcttgtttgtcgtgctcatcaggtggtggaggatggatatgaattctttgctaaccggcagcttgtaacaatattttcggcacctaattactgtggggagtttgataatgctggtgctatgatgagtgttgatgagacactgatgtgctctttccaaatattaaagccagctgataagaaagcaaggctcaatttcggaagtacaacaactgctaaaccaggaaactctccagcaggggtaaagtccttccttggtgcaaaagtatgaagttgattttggcgaaaagattgctgtcacaactggtctgcgaaggaaagttgagcttcatatgttattttggaattgtaaaagcaaagggaaatgctgtcatgaactatgtagaccattgtttttcactgttacaaatttgtattttgagatttaacagcccatgatctcttccgtgttttctttgtacactaatttctggtatatgttattatgagttttaagcttatcaaaaaaaaaaaaaaaaaa

SEQ ID NO: 4605 - DNA, 1620 bp, Oryza sativa Japonica Group
ctctctctctctcctcctcggccgcgtaaaacacctcccaccgcctcctccaccccctcctcctccccccgcagagccgaaaccctaactccgccgatctctccaggtgcccaaggggagggaggggatggcggcggcaccgggggcgggagggcagggcggcggcgggatggacgccgtcctcctcgacgatatcatccgccgcctgctcgaggtgcggacggcgcgcccggggaagcaggtgcagctctccgagtcggagatccgccagctctgcactgtatcccgagaaatcttcctcagccagcccaatctcctcgagctcgaggcgcccatcaagatctgcggtgacatccatggtcagtacagtgaccttctaaggctttttgagtatggtggttttcccccagaagccaattatctattcttaggtgattatgttgatcgaggcaaacaaagtttggaaacaatatgcctcctccttgcatacaaaatcaagtacccggagaatttttttcttctcagaggcaatcatgagtgtgcatcaataaacaggatatatggattttatgatgaatgcaaacgccgatttaatgtgcgtctatggaaggtcttcactgattgttttaactgtctccctgtggctgcgctaattgatgataaaatattatgcatgcatggtggcctctctcctgatctgacacatttagatgagataaagagcttgccccgtcctactgatgtaccggatacaggtctgctatgcgacctactttggtcagatccaggaaaagacgttcaaggttggggcatgaatgataggggggtctcatacacttttggtgctgacaaagtttcagaattcctggaaaaacatgaccttgatcttatttgccgggcacatcaggttgttgaggatggatatgagttctttgccgacagacaacttgtcaccatattctcagctccaaactattgtggtgaatttgataatgcaggtgcaatgatgagtgttgatgaaactttgatgtgttcttttcaaattcttaaacctgctgagagaaaaggcaaatttatggcatcaaacaaaatgtgaaatggtgaagcccatttcgctcatagcgactctgaggctgtcctgtggatgcatctagacatcaacgtgcaggcgttaggcttgaagcaacattgggctaattctaccggagaagccaaataatatcatatctaacagttggtctggaaggttactcttcatggcaagtgccaattttttttccattttctgttatgatgcgtgaaactatcttgtagatgtagatatattgattatggaaggatgaagttgccaattgacctgaggcggtttccttctgcagccaggaaaaatctgaatatggagtttctgtttggtagtttcactatttaaaagcacatgtatcacttgtatggaggtaacaactttacttatgcaagcccgtgttttctgttgcttgtaagcaaaattggatgagtttttatcttgttttctatagcgtgctaatattgccaatggcaacaatttgcgaactgcaattctagaatgtactggatgattgaacctttaagcatttgcgaact

SEQ ID NO: 4606 - DNA, 2569 bp, Zea mays
acgctctaggctctcgtttcctcgtactggtacaagcgggacgggagcagcagcagtagcgtgatccatccccatggcgggggcaacctcttcctcgtccgtgtctttgatcctcatcctcgtcgcgtcctcctcgccgcggcgcagccggggcagggtgggcattgctctgcgctcgtacggctacagcggcgccgagctgcggttgcattgggcgcgtcggggctcgtctcgggatggaccggcggtagtgcgcgccgcagcggttccggccgggggtgagggcgaggacgccgcggcggtagggaagagctcctcgtccaaggcggtcgccgtgcagggcagcgagtccaaggctgtatattctacttcacctcccaaaactgcgacgtctgcgccgaagcaaaaccagagcgctgcaaagcaaaacggaacagttgggagcagcagtgcgagcaaatccccggcgcctgcggtatctgaatccaaagctgaaccatctgctcctgtcaccaagacagaaaccgatgccagtgcgaaggttgaagagctgaagccctcagtggatgatgctaaacccgtagaaagcataggcatccctgagccggtggatgctaaggtggacgccgctgcagctactgatgccgcggcgagtgctgctgatgacactgaagacaaggaacatggccctttggctgggcctaatgtgatgaatgtcgtcgtggtggcttctgaatgcgctcctttctgcaagacaggtggccttggagatgttgtgggtgctttgcccaaggctttggcgaggagaggacaccgtgttatggtcgtgataccaagatatggagagtatgcagaagcccgggatttaggtgtaaggagacgttacagggtggctggacaggattcagaagttacttattttcactcttacattgatggcgttgattttgtattcatagaagcccctcccttccggcaccggcacaatgatatttatggaggagaaagatcggatgttttgaagcgcataattttgttctgcaaggccgctgttgaggttccatggtacgctccatgtggtggtaccgtctatggtgatggcaatttagttttcattgctaatgattggcatacggcacttcttccggtctacctaaaagcctactaccgggacaatggtttgatgcagtatgctcgctcagtgcttgtgatacacaacattgctcatcagggtcgtggccctgtagacgacttcgtcaactttgacttgcctgaacattacatcgatcacttcaaactgtacgacaatatcggtggcgagcactgcaacgtttttgccgcagggctgaagatggcagaccaggtggtgaccgtcagtaatggatacctatgggagctgaggacatcggaaggtgggtggggcctccacgacatcataaaccagaacgactggaagctgcagggcatcgtgaacggcatcgacatgagcgagtggaaccccgctgtggacgtgcacctccactccgacgaatacaccaactacacgttcgagacgctggacacgggcaagcggcagtgcaaggctgccctgcagcggcagctcggcctgcaggtccgcgacgacgtgccactaatcgggttcatcgggcggctggaccaccagaagggcgtggacatcatcgccgacgcgatccactggatcgcgggacaggacgtgcagcttgtgatgctgggcacggggcgccccgacctggaggacatgctgcggcggtgcgaggcggagcacagcgacaaggtgcgcgcgtgggtggggttctcggtgcccttggcgcaccgcatcacggcgggcgcggacgtcctgctgatgccgtcgcggttcgagccgtgcgggctgaaccagctctacgcgatggcgtacgggaccgtgcccgtggtgcacgccgtgggcgggctccgggacacggtggcgccgttcgacccgttcaacgacaccgggctggggtggacgttcgaccgcgcggaggcgaatcggatgatcgacgcgctctcgcactgcctcaacacgttccggaactacaaggagagctggcgcggcctggaggcgcgcggcatggcgcaggacctcagctgggaccacgccgccgtgctgtatgaggacgtgctcgtcaaggccaagtaccagtggtaagtgagttacgccgacgcccttcatgtcgcgggacagtcctggacgccctgggcactgcgtgctcttctcacgcggctttgctgcgtgcggcgcatttgctcaattggcgcggggcgatggtggttggcctacgtcggcttcggctaggtgccttcggattttcagcttcttaccaccaaaacaccaaaagctgctgcggactattaaacgctcagtttttcagttagcttctataaaaatcgatcgtaaaaatcatctataatcaacataaacacataatggacggagtacttttaataatagaaatctatcgctttgtagatcttaccctatggacaccttcatcttgaaaattgtttggttgaaataacagtgagttgt

SEQ ID NO: 4607 - DNA, 2302 bp, Sorghum bicolor
  misc_feature (2247)..(2247): n is a, c, g, or t
cggaagcagcagcagcagtagcgtgaggcatccccatgtcggcggcaatctcctcctcgtcctcggcttttctcctcctcatcgcgtcctcctcgccgcggcgcaggcggggcagggtgggcgctgctctgcgctcctacggctacagcggcgcggagctgcggttgcattgggcgcggcgggccccgtcacgggatgcggcggcggtagtagtgcgcgccgcagcggcgccggccgggggtgaggagggcgaggaggccgcggcggcagggatgagctcctcgtccaagggcgtcgccgtgcagggcagcaaggccaaggctgtagattctacttcacctcccaaacctgtgacttctgcgacgaagcaaagtccgagcgctgcaaatcaaaacggaacggttgggagcagcagtgcaagcaaatctgccacgccggtgtccgaactcaaagctgaaacatcagctcctgtcaccaagactgaaaccgatgccagtgcgaaggttgaagagccgaagcccgcggtggatgatgctaaaccggtggaaagcataggcgttgctgagccggtggatgctaaggtggacgtcgctgcagctactgatgtggaggcgagtgctgctgatgacagtgaggacaagaaacctggccctttggctgggcctaatgtgatgaatgtcgtcgtggtggcttctgaatgtgctcctttctgcaagacaggtggccttggagatgttgtgggtgctttgccgaaggctttggcgaggagagggcaccgcgttatggtcgtgataccaagatatggagaatatgcagaagcccgagatttaggtgtgcggaaacgttacagggtagctggacaggattcagaagttacttactttcactcttacattgatggagttgattttgtattcatagaagccccacccttccggcaccggcacaataatatttatggaggagaaagattggatattttgaagcgcatgattttgttctgcaaggccgctgttgaggttccatggtatgctccatgtggcggtaccgtctatggtgatggcaacttagttttcattgctaatgattggcatactgcacttctgccggtctatctaaaggcctattaccgggacagtggtttgatgcagtatgctcgctctgtgcttgtgatacacaacattgctcatcagggtcgtggccctgtagacgacttcgtcaattttgacttgcctgaacattacatcgatcacttcaaactgtatgacaatatcggtggcgatcacagcaacgttttcgccgcgggcctgaaggcggcagaccgggtggtgaccgtcagcaatggctacctgtgggagctgaagacttcggaaggtgggtggggcctccacggcatcataaaccagaacgactggaagctgcagggcatcgtgaacggcatcgacatgagcgagtggaaccccgctgtggacgtgcacctccactccgacggctacaccaactacacgttcgagacgctggacactggcaagcggcagtgcaaggccgccctgcagcggcagctcggcctgcaggtccgcgacgacgtgccactgatcgggttcatcggtcgcctggatggacagaagggcgtggacctcatcggcgacgcgatccactggatcgcggggcaggacgtgcagctggtgatgctgggcaccgggcgccccgacctggaggacatgctgcggcggtgcgaggcggagcacaacgacaaggtgcgcgcgtgggtcggtttctcggttcccctggcgcaccgcatcacggcgggcgccgacgtcctgctgatgccgtcgcggttcgagccgtgcgggctgaaccagctctacgcgatggcgtacgggaccgtgcccgtggtgcacgccgtgggcgggctccgggacacggtggcgccgttcgacccgttcaacgacaccgggctcgggtggacgttcgaccgcgccgaggcgaatcggatgatcgacgcgctccatcactgcctcaacacgtaccggaacttcaaggagagctggcgcggcctgcaggagcgcggcatggcgcaggacctgagctgggaccacgccgccgtgctgtatgaggacgtgctcgtcaaggccaagtaccagtggtgactggtgagtgggtttaactggcgacgccgacgccctcctgtcgcgggacctggacgcgttgggcatgttatttcggcggctcttctcccctcggctntgatgcgtgcggcgcaattgcgccgcccgggcggagggtgatggtggttggccta

SEQ ID NO: 4608 - DNA, 2585 bp, Zea mays
gcggaagcagcagtagcgtgaggcatccccatgccgggggcaatctcttcctcgtcgtcggcttttctcctccccgtcgcgtcctcctcgccgcggcgcaggcggggcagtgtgggtgctgctctgcgctcgtacggctacagcggcgcggagctgcggttgcattgggcgcggcggggcccgcctcaggatggagcggcgtcggtacgcgccgcagcggcaccggccgggggcgaaagcgaggaggcagcgaagagctcctcctcgtcccaggcgggcgctgttcagggcagcacggccaaggctgtggattctgcttcacctcccaatcctttgacatctgctccgaagcaaagtcagagcgctgcaatgcaaaacggaacgagtgggggcagcagcgcgagcaccgccgcgccggtgtccggacccaaagctgatcatccatcagctcctgtcaccaagagagaaatcgatgccagtgcggtgaagccagagcccgcaggtgatgatgctagaccggtggaaagcataggcatcgctgaaccggtggatgctaaggctgatgcagctccggctacagatgcggcggcgagtgctccttatgacagggaggataatgaacctggccctttggctgggcctaatgtgatgaacgtcgtcgtggtggcttctgaatgtgctcctttctgcaagacaggtggccttggagatgtcgtgggtgctttgcctaaggctctggcgaggagaggacaccgtgttatggtcgtgataccaagatatggagagtatgccgaagcccgggatttaggtgtaaggagacgttacaaggttgctggacaggattcagaagttacttattttcactcttacattgatggagttgattttgtattcgtagaagcccctcccttccggcaccggcacaataatatttatgggggagaaagattggatattttgaagcgcatgattttgttctgcaaggccgctgttgaggttccatggtatgctccatgtggcggtactgtctatggtgatggcaacttagttttcattgctaatgattggcataccgcacttctgcctgtctatctaaaggcctattaccgggacaatggtttgatgcagtatgctcgctctgtgcttgtgatacacaacattgctcatcagggtcgtggccctgtagacgacttcgtcaattttgacttgcctgaacactacatcgaccacttcaaactgtatgacaacattggtggggatcacagcaacgtttttgctgcggggctgaagacggcagaccgggtggtgaccgttagcaatggctacatgtgggagctgaagacttcggaaggcgggtggggcctccacgacatcataaaccagaacgactggaagctgcagggcatcgtgaacggcatcgacatgagcgagtggaaccccgctgtggacgtgcacctccactccgacgactacaccaactacacgttcgagacgctggacaccggcaagcggcagtgcaaggccgccctgcagcggcagctgggcctgcaggtccgcgacgacgtgccactgatcgggttcatcgggcggctggaccaccagaagggcgtggacatcatcgccgacgcgatccactggatcgcggggcaggacgtgcagctcgtgatgctgggcaccgggcgggccgacctggaggacatgctgcggcggttcgagtcggagcacagcgacaaggtgcgcgcgtgggtggggttctcggtgcccctggcgcaccgcatcacggcgggcgcggacatcctgctgatgccgtcgcggttcgagccgtgcgggctgaaccagctctacgccatggcgtacgggaccgtgcccgtggtgcacgccgtgggggggctccgggacacggtggcgccgttcgacccgttcaacgacaccgggctcgggtggacgttcgaccgcgcggaggcgaaccggatgatcgacgcgctctcgcactgcctcaccacgtaccggaactacaaggagagctggcgcggcctgcaggcgcgcggcatggcgcaggacctcagctgggaccacgccgccgtgctgtatgaggacgtgctcgtcaaggcgaagtaccagtggtgagcgaattaattggcgacgccgacgccgctcctgtcgcaggacctggacgttatttagaaggctcttctccctggcggctttgatgcgtgcgtcgcatttgcgccgggcggacgggcgacggtggttggcctaccgcctacgtcggctgcgtgccctgggaatttgggcgggcacgatgatgccactgggcaccgggcgcggggtagtatgatatgaaaccgacggcgatggagatgaggcgcatggcattttcccactgataaatggggagttgtatgctactttaatatcgccactcctgttagtatttatattgatgctgtcaagttttccactccaagaacaaatgacggtagccggtaagtataggcctatttgtagagctagttagaagtacatgtgcccaaaccgacaacattgtacgtacattataaagcacggcactatttgttactgtc

SEQ ID NO: 4609 - DNA, 2480 bp, Zea mays
gcggccgcctggtaggcgctggtacaagcggaagcagcagtagcgtgaggcatccccatgccgggggcaatctcttcctcgtcgtcggcttttctcctccccgtcgcgtcctcctcgccgcggcgcaggcggggcagtgtgggtgctgctctgcgctcgtacggctacagcggcgcggagctgcggttgcattgggcgcggcggggcccgcctcaggatggagcggcgtcggtacgcgccgcagcggcaccggccgggggcgaaagcgaggaggcagcgaagagctcctcctcgtcccaggcgggcgctgttcagggcagcacggccaaggctgtggattctgcttcacctcccaatcctttgacatctgctccgaagcaaagtcagagcgctgcaatgcaaaacggaacgagtgggggcagcagcgcgagcaccgccgcgccggtgtccggacccaaagctgatcatccatcagctcctgtcaccaagagagaaatcgatgccagtgcggtgaagccagagcccgcaggtgatgatgctagaccggtggaaagcataggcatcgctgaaccggtggatgctaaggctgatgcagctccggctacagatgcggcggcgagtgctccttatgacagggaggataatgaacctggccctttggctgggcctaatgtgatgaacgtcgtcgtggtggcttctgaatgtgctcctttctgcaagacaggtggccttggagatgtcgtgggtgctttgcctaaggctctggcgaggagaggacaccgtgttatggtcgtgataccaagatatggagagtatgccgaagcccgggatttaggtgtaaggagacgttacaaggtagctggacaggattcagaagttacttattttcactcttacattgatggagttgattttgtattcgtagaagcccctcccttccggcaccggcacaataatatttatgggggagaaagattggatattttgaagcgcatgattttgttctgcaaggccgctgttgaggttccatggtatgctccatgtggcggtactgtctatggtgatggcaacttagttttcattgctaatgattggcataccgcacttctgcctgtctatctaaaggcctattaccgggacaatggtttgatgcagtatgctcgctctgtgcttgtgatacacaacattgctcatcagggtcgtggccctgtagacgacttcgtcaattttgacttgcctgaacactacatcgaccacttcaaactgtatgacaacattggtggggatcacagcaacgtttttgctgcggggctgaagacggcagaccgggtggtgaccgttagcaatggctacatgtgggagctgaagacttcggaaggcgggtggggcctccacgacatcataaaccagaacgactggaagctgcagggcatcgtgaacggcatcgacatgagcgagtggaaccccgctgtggacgtgcacctccactccgacgactacaccaactacacgttcgagacgctggacaccggcaagcggcagtgcaaggccgccctgcagcggcagctgggcctgcaggtccgcgacgacgtgccactgatcgggttcatcgggcggctggaccaccagaagggcgtggacatcatcgccgacgcgatccactggatcgcggggcaggacgtgcagctcgtgatgctgggcaccgggcgggccgacctggaggacatgctgcggcggttcgagtcggagcacagcgacaaggtgcgcgcgtgggtggggttctcggtgcccctggcgcaccgcatcacggcgggcgcggacatcctgctgatgccgtcgcggttcgagccgtgcgggctgaaccagctctacgccatggcgtacgggaccgtgcccgtggtgcacgccgtgggggggctccgggacacggtggcgccgttcgacccgttcaacgacaccgggctcgggtggacgttcgaccgcgcggaggcgaaccggatgatcgacgcgctctcgcactgcctcaccacgtaccggaactacaaggagagctggcgcgcctgcagggcgcgcggcatggccgaggacctcagctgggaccacgccgccgtgctgtatgaggacgtgctcgtcaaggcgaagtaccagtggtgagcgaattaattggcgacgcgacgccgctcctgtcgcaggacctggacgttatttagaaggctcttctccctggcggctttgatgcgtgcgtcgcatttgcgccgggcggacgggcgacggtggttggcctaccgcctacgtcggctgcgtgccctgggaatttgggcgggcacgatgatgccactgggcaccgggcgcggggtagtatgatatgaaaccgacggcgatggagatgaggcgcatggcattttcccactgataaatggggagttgtatgctactttaatatcgccactcctgttagtatttatattgatggcggccgc

SEQ ID NO: 4610 - DNA, 2644 bp, Oryza sativa Japonica Group
aatctcttttctctcgtcgtcgtctcgtcttcccacctctcggattcccgagctccacacgacacgacccacctcggccactctccgccgtcggtggccagtggcctccaccccctccgtcccccggggaccacaccggcgtaacatcagccacacctccggcagatctttcccccgccgcttaattcacctcctcttcgccgcggcgcaggcggagcagggtgagcggggtttggtggcacttgtatggtggcacggggctgcggttgcattgggagcggcggggtttggttcgggacggagccgtcgtgtgctcggcgtcggccgccggtggtgaggatggcgtcgcgaaggcgaagacgaagtcagcggggagctcgaaggcggtcgctgtgcagggcagcacggccaaggctgatcatgttgaggattcagtttcatcacccaaatacgtgaaacctgccgttgcgaagcaaaatggagaggttgtgagcagagctaccaaatctgatgcaccagtgtctaaacccaaagttgacccgtcagttcctgcttccaaggctgaagctgatggtaatgcacaagctgtggaatcgaaggctgcactggacaagaaggaagacgtcggtgttgctgaaccgttggaagctaaggctgatgctggtggagatgcaggtgcagtaagctctgcagatgatagtgagaacaaggaatctggtccattggcagggccaaatgtgatgaatgtcattgtggtggcttctgaatgttctcctttctgtaaaacaggtggtcttggagatgttgtgggtgctttgcctaaggctctggcaagaagaggacatcgtgttatggttgtgataccaagatacggagaatatgcagaagccaaggatctaggtgtccgcaaacgttacagggtagctggacaggattcagaagtgagttattttcatgcttttatcgatggtgttgattttgtgtttctagaggcccctccctttcgacaccggcacaatgatatttatggaggagaaagatttgatgttttgaagcgtatgattttgttctgcaaagctgctgttgaggttccttggtttgctccatgtggtggttccatctacggtgatggcaatttagtcttcattgcaaatgattggcatactgcacttttacccgtatatttgaaggcatattaccgagataatggcttgatgcagtatactcgctctgttcttgtgatacacaacattgctcatcagggtcgtggccctgtagatgacttcgccacgatggacttgcccgagcactacatcgatcatttcagactgtacgaccccgtcggcggtgagcacagcaacgtgttcgccgctggcctgaagatggctgaccgcgcggtcaccgtcagccatggctatctgtgggagatcaagacaatggacggtggctggggcctccacgagataataaaccacaacgactggaagctgcagggcatcgtgaacggcatcgacatggccgaatggaaccccgaggtggacgagcacctgcagtccgacggctacgccaactacacgttcgagacgctggacaccggcaagaaacagtgcaaggaggcgctgcagcggcagctgggcctgcaggtccgcgacgacgtgccgctgatcgggttcatcgggcggctcgaccaccagaagggcgtggacatcatcggcgacgcgatgccgtggatcgccgggcaggacgtgcaggtggtgatgctgggcacggggcggccggacctggaggagatgctgcggcggttcgagtcggagcacaacgacaaggtgcgcgggtgggtggggttctcggtgcagctggcgcaccggatcacggcgggcgccgacgtcctcctgatgccgtcgcggttcgagccgtgcgggctgaaccagctgtacgccatggcgtacggcaccgtgcccgtggtgcacgccgtgggcgggctccgcgacacggtggcgccgttcgacccgttcgccgacacggggctcgggtggacgttcgaccgcgccgaggcgaaccggatgatcgacgcgctcgggcactgcctcaacacgtaccggaactacaaggagagctggagggggctccaggcgcgcggcatggcgcaggacctcagctgggaccacgccgccgagctctacgaggacgtcctcgtcaaggccaagtaccagtggtgagctggtggtatttttcgcgacgcctctggatcccgccgtggatgggcgcgctttttctctagggcggctctgcgtcggagacgctcagacgcatcgcgcgcgttcgcgcccacacgatgactggcacgctgctgctgagacggcggcacgcgatgccatcatgccaccggacggtaggagcaacggtggaagtgaactgtactactggtgctacactgctactacatgagatctgctcttattggtcacgtactcacgttcacgctgaattaccgaatgtgttgtgtcttgtgtgtgtgtgttaaaggcattgtcctggtaaatggtggagacgagatggccgggtcgcgggagttatatttgtatatgttgccagctttctgagtttttcaagccagtgcggctcttcagtgcaggttccaagc

SEQ ID NO: 4611 - DNA, 4200 bp, Oryza sativa Indica Group
gtcgggggcaatcgcttcctctccggcggctactctcttcctcgctggttcctcctcctcttcgccgcggcgcaggcggagcagggtgagcggggtttggtggcacttgtatggtggcacggggctgcggttgcattgggagcggcggggtttggttcgggacggagccgtcgtgtgctcggcgtcggccgccggtggtgaggatggcgtcgcgaaggcgaaggcgaagtcagcggggagctcgaaggcggtcgctatgcagggcagcacggccaaggttgatacttttcctccattttttttagaaccaagcttgagactgttggcccacgtgtttcagactttcagatcgtgtcattttgatattttaactacttttcgtgatttgattatagtatgcgtgccagaacgtgcaattagttagtgcaaatagcgcagttacatgtagagccatgttgctagaactacagttgcttgatctagcgagctgggagctaattatttaccatttgttattcggaaatgttacctcgctgcactttttgacatgaatttccctatccaacttgtttagtatattccactacccctgtgtgacatttcatttttcaagttgataatgcttaaatgcttataactttgctgattctggttgagtgatggtgtatatgcgttcaggctgatcatgttgaggattcagtttcatcacccaaatccgtgaaacctgccgttgcgaagcaaaatggagaggttgtgagcagagctaccaaatctgatgcaccagtgcctaaacccaaagttgacccgtcagttcctgcttccaaggctgaagctgatggtaatgcacaagctgtggaatcgaaggctgcactggacaagaaggaagacgtcggtgttgctgaaccgttggaagctaaggctgatgctggtggagatgcaggtgcagtaagctctgcagatgatagtgagaacaaggaatctggtccattggcagggccaaatgtgatgaatgtcattgtggtggcttctgaatgttctcctttctgtaaaacaggtatgcatatctaaactggaaattgggcctgaccccatcgtttcccctttttgagcatgaccaatcaggcttttacttttaagcttaggcaatgttccttctaataactgctatcatgtgaaggtggtcttggagatgttgtgggtgctttgcctaaggctctggcaagaagaggacatcgtgttatggtacgtactccttcacatttgtctttgtttgattgtctcggaagagattaacaatctgtagtactagtatatgtgcaatccacaacgtaagagactaagaggtggtattttgattgttatatctgaaactcttaagtctcattcttttgatttgcgtgcatcatggaaaacaatcctcaaattgttaccctgttgtctctgtcagctattaaatgttgtttcacatatttaggagagaagtgtggaaatctatcttgtattcttgttagataacaatttttgagctgtatgatttagcatgcttgagatggatgacaattcttaagatagcatcttaaattgaaatgtagtaggatgtgcaccgattgagttcagtggcttagttttaagtgatccaaatataagtggctatttcaattttaggttgtgataccaagatacggagaatatgcagaagccaaggatctaggtgtccgcaaacgttacagggtagctggacaggtaagaaaacattgaaacagttattgtgcaatgtgaaatgaaaagtttaaaggttcatgacagaatcctttttttttctgtgtgtgtggttttcaggattcagaagtgagttattttcatgcttttatcgatggtgttgattttgtgtttctagaggcccctccctttcgacaccggcacaatgatatttatggaggagaaagatttgtaagtcccaatttttctatagcttaattgacttacaaataagttccttttaaatcttctgtaaatattttttgcacaattttatcatttgatggcaggatgttttgaagcgtatgattttgttctgcaaagctgctgttgaggtaacttcccattttattgctactagtctataaatgtactccttacagttctgttagattcgcagctcactccaccacgagtgggccacccaggtctcaccaccatcaatttccagtgggactaaacacaataatttcttactacagtccacaattagaatttcgtacaccagctggtcagtcgatgcatatccgagtttcttgcagcaagctgtttatgcacctttcactacttcgtagcaaacagttaatactaaaattttgatgtttgacaattagaatttagtacaccatctagtcagtcgatatatatctgagtgtcttgcagcaagctgtttgtgtgccattgactactttgtagaaaacacaagaacaattaatgataagattttcatgtttgttttagtttatgaggtgaatgagcctgatgttatgttctcgaataagtacaattcattcatctgatgaaacatttgcaggttccttggtttgctccatgtggtggttccatctacggtgatggcaatttagtcttcattgcaaatgattggcatactgcacttttacccgtatatttgaaggcatattaccgagataatggcttgatgcagtatactcgctctgttcttgtgatacacaacattgctcatcaggtttttcacctagtcttattctgcaatttcattctttgaatattatctgaaccactaatgtacttgttttcaagtgatctgctcaatggcatttgtattttgcaagtgtttctccttttctttaataagggccatacaattttaaacctggtattcagataaagtacaaaattcagttcagagttgtgtactggaatacagcagagtgcacctgctattttaccctatatgtagaaaatataggaaatttgtgtttatttatgacaccagttttgttcttacgaagttgaattagttattgattttgcctcttgaaagataattgactatactactgtcatagtgacaccaatttagttcttatgaaagttaaattggcttctatttattttatgattgcgtttcacaatgtaattcaatcttgttttcccgcttgtcatccgtgggcatttaccttgatgctaatctcttatagatgtttcatgattttcttctttcagggtcgtggccctgtagatgacttcgccacgatggacttgcccgagcactacatcgatcatttcagactgtacgaccccgtcggcggtgagcacagcaacgtgttcgccgctggcctgaagatggctgaccgcgcggtcaccgtcagccatggctatctgtgggagatcaagacaatggacggtggctggggcctccacgagacaataaaccacaacgactggaagctgcagggcatcgtgaatggcatcgacatggccgaatggaaccccgaggtggacgagcacctgcagtccgacggctacgccaactacacgttcgagacgctggacaccggcaagaaacagtgcaaggaggcgctgcagcggcagctgggcctgcaggtccgcgacgacgtgccgctgatcgggttcatcgggcggctcgaccaccagaagggcgtggacatcatcggcgacgcgatgccgtggatcgccgggcaggacgtgcaggtggtgatgctgggcacggggcggccggacctggaggagatgctgcggcggttcgagtcggagcacaacgacaaggtgcgcgggtgggtggggttctcggtgcagctggcgcaccggatcacggcgggcgccgacgtcctcctgatgccgtcgcggttcgagccgtgcgggctgaaccagctgtacgccatggcgtacggcaccgtgcccgtggtgcacgccgtgggcgggctccgcgacacggtggcgccgttcgacccgttcgccgacacggggctcgggtggacgttcgaccgcgccgaggcgaaccggatgatcgacgcgctcgggcactgcctcaacacgtaccggaactacaaggagagctggagggggctccaggcgcgcggcatggcgcaggacctcagctgggaccacgccgccgagctctacgaggacgtcctcgtcaaggccaagtaccagtgg

SEQ ID NO: 4612 - DNA, 2394 bp, Oryza sativa
ggaggaggaggagcggcggcggcggcggatcctatgtcgggggcaatcgcttcctcgccggcggctactctcttcctcgctggctcctcctcctcttcgccgcggcgcaggcggagcagggtgagcggggtttggtggcacttgtatggtggcacggggctgcggttgcattgggagcggcggggtttggttcgggacggagccgtcgtgtgctcggcgtcggccgccggtggtgaggatggcgtcgcgaaggcgaagacgaagtcagcggggagctcgaaggcggtcgctgtgcagggcagcacggccaaggctgatcatgttgaggattcagtttcatcacccaaatacgtgaaacctgccgttgcgaagcaaaatggagaggttgtgagcagagctaccaaatctgatgcaccagtgtctaaacccaaagttgacccgtcagttcctgcttccaaggctgaagctgatggtaatgcacaagctgtggaatcgaaggctgcactggacaagaaggaagacgtcggtgttgctgaaccgttggaagctaaggctgatgctggtggagatgcaggtgcagtaagctctgcagatgatagtgagaacaaggaatctggtccattggcagggccaaatgtgatgaatgtcattgtggtggcttctgaatgttctcctttctgtaaaacaggtggtcttggagatgttgtgggtgctttgcctaaggctctggcaagaagaggacatcgtgttatggttgtgataccaagatacggagaatatgcagaagccaaggatctaggtgtccgcaaacgttacagggtagctggacaggattcagaagtgagttattttcatgcttttatcgatggtgttgattttgtgtttctagaggcccctccctttcgacaccggcacaatgatatttatggaggagaaagatttgatgttttgaagcgtatgattttgttctgcaaagctgctgttgaggttccttggtttgctccatgtggtggttccatctacggtgatggcaatttagtcttcattgcaaatgattggcatactgcacttttacccgtatgtttgaaggcatattaccgagataatggcttgatgcagtatactcgctctgttcttgtgatacacaacattgctcatcagggtcgcggccctgtagatgacttcgccacgatggacttgcccgagcactacatcgatcatttcagactgtacgaccccgtcggcggtgagcacagcaacgtgttcgccgctggcctgaagatggctgaccgcgcggtcaccgtcagccatggctatctgtgggagatcaagacaatggacggtggctggggcctccacgagataataaaccacaacgactggaagctgcagggcatcgtgaatggcatcgacatggccgaatggaaccccgaggtggacgagcacctgcagtccgacggctacgccaactacacgttcgagacgctggacaccggcaagaaacagtgcaaggaggcgctgcagcggcagctgggcctgcaggtccgcgacgacgtgccgctgatcgggttcatcgggcggctcgaccaccagaagggcgtggacatcatcggcgacgcgatgccgtggatcgccgggcaggacgtgcaggtggtgatgctgggcacggggcggccggacctggaggagatgctgcggcggttcgagtcggagcacaacgacaaggtgcgcgggtgggtggggttctcggtgcagctggcgcaccggatcacggcgggcgccgacgtcctcctgatgccgtcgcggttcgagccgtgcgggctgaaccagctgtacgccatggcgtacagcaccgtgcccgtggtgcacgccgtgggcgggctccgcgacacggtggcgccgttcgacccgttcgccgacacggggctcgggtggacgttcgaccgcgccgaggcgaaccggatgatcgacgcgctcgggcactgcctcaacacgtaccggaactacaaggagagctggagggggctccaggcgcgcggcatggcgcaggacctcagctgggaccacgccgccgagctctacgaggacgtcctcgtcaaggccaagtaccagtggtgagctggtggtatttttcgcgacgcctctggatcccgccgtggatgggcgcgctttttctctagggcggctctgcgtcggagacgctcagacgcatcgcgcgcgttcgcgcccacacgatgactggcacgctgctgctgagacggcggcacgcgatgccatcatgccaccggacggtaggagcaacggtggaagtgaactgtactactggtgctacactgctactacatgagatctgctcttattggtcacgtactcacgttcacgctgaattaccga

SEQ ID NO: 4613 - DNA, 2115 bp, Sorghum bicolor
atgtcggcggcaatctcctcctcgtcctcggcttttctcctcctcatcgcgtcctcctcgccgcggcgcaggcggggcagggtgggcgctgctctgcgctcctacggctacagcggcgcggagctgcggttgcattgggcgcggcgggccccgtcacgggatgcggcggcggtagtagtgcgcgccgcagcggcgccggccgggggtgaggagggcgaggaggccgcggcggcagggatgagctcctcgtccaagggcgtcgccgtgcagggcagcaaggccaaggctgtagattctacttcacctcccaaacctgtgacttctgcgacgaagcaaagtccgagcgctgcaaatcaaaacggaacggttgggagcagcagtgcaagcaaatctgccacgccggtgtccgaactcaaagctgaaacatcagctcctgtcaccaagactgaaaccgatgccagtgcgaaggttgaagagccgaagcccgcggtggatgatgctaaaccggtggaaagcataggcgttgctgagccggtggatgctaaggtggacgtcgctgcagctactgatgtggaggcgagtgctgctgatgacagtgaggacaagaaacctggccctttggctgggcctaatgtgatgaatgtcgtcgtggtggcttctgaatgtgctcctttctgcaagacaggtggccttggagatgttgtgggtgctttgccgaaggctttggcgaggagagggcaccgtgttatggtcgtgataccaagatatggagaatatgcagaagcccgagatttaggtgtgcggaaacgttacagggtagctggacaggattcagaagttacttactttcactcttacattgatggagttgattttgtattcatagaagccccacccttccggcaccggcacaataatatttatggaggagaaagattggatattttgaagcgcatgattttgttctgcaaggccgctgttgaggttccatggtatgctccatgtggcggtaccgtctatggtgatggcaacttagttttcattgctaatgattggcatactgcacttctgccggtctatctaaaggcctattaccgggacaatggtttgatgcagtatgctcgctctgtgcttgtgatacacaacattgctcatcagggtcgtggccctgtagacgacttcgtcaattttgacttgcctgaacattacatcgatcacttcaaactgtatgacaatatcggtggcgatcacagcaacgttttcgccgcgggcctgaaggcggcagaccgggtggtgaccgtcagcaatggctacctgtgggagctgaagacttcggaaggtgggtggggcctccacgacatcataaaccagaacgactggaagctgcagggcatcgtgaacggcatcgacatgagcgagtggaaccccgctgtggacgtgcacctccactccgacggctacaccaactacacgttcgagacgctggacactggcaagcggcagtgcaaggccgccctgcagcggcagctcggcctgcaggtccgcgacgacgtgccactgatcgggttcatcggtcgcctggatggacagaagggcgtggacctcatcggcgacgcgatccactggatcgcggggcaggacgtgcagctggtgatgctgggcaccgggcgccccgacctggaggacatgctgcggcggtgcgaggcggagcacaacgacaaggtgcgcgcgtgggtcggtttctcggttcccctggcgcaccgcatcacggcgggcgccgacgtcctgctgatgccgtcgcggttcgagccgtgcgggctgaaccagctctacgcgatggcgtacgggaccgtgcccgtggtgcacgccgtgggcgggctccgggacacggtggcgccgttcgacccgttcaacgacaccgggctcgggtggacgttcgaccgcgccgaggcgaatcggatgatcgacgcgctccatcactgcctcaacacgtaccggaacttcaaggagagctggcgcggcctgcaggagcgcggcatggcgcaggacctgagctgggaccacgccgccgtgctgtatgaggacgtgctcgtcaaggccaagtaccagtggtga

SEQ ID NO: 4614 - DNA, 1899 bp, Hordeum vulgare subsp. vulgare
ggccatgcatcgcacccgcacagcgtcgccctagggtttctccgtctctttctctctctctctcccgttcctctcgtcccaatcgaatcggaatccatggagtcgtcgcggtcgcggaagcgcacgcgtcaagagttggacggcgcaggcgacccgccgccggagcgggaggtggtagcgaggggtggcgcgtcgccgccgtggcgggatgacgaccgtgacggccattacgtgtttgatctcggcgagaacttgacccgtcggtacaaaatcttgagcaaaatgggtgaaggtacttttggccgagttttggaatgctgggaccgtgaaacacgtgaatatgttgcaataaaagttgtccgaagcatccggaagtaccgggatgctgcaatgattgagatcgatgtgctcaatcgccttgcagaaaatgagagatacagatccctctgtgtccaaattcaaagatggtttgactatcgcaaccatatatgcattgtatttgagaagcttgggccaagcttgtatgattttctaaagagaaatagataccaacctttccctgtggaacttgtgcgggagtttggacgacaactgttggaatctgtagcatatatgcacgaattacgccttattcacactgatctgaagccagaaaacatactccttgtatcttccgaatatataaaggttccaagttccaagaattcacaagatgagatacactgcaagtgcttgccaaagtccagtgccataaagctgatagattttggtagtactgcctttgataatcaggaacataactcgattgtttctacgaggcattacagggcacctgaaataatcttaggcttaggctggagtttgccatgtgatatttggagtgttggttgcatcctcgttgagctatgctcgggggaagcattgtttcagacacatgagaacctggaacacctagcaatgatggagagggttttgggacccataccagagcacatgatacggaaggctagttcatcagctcagaaatattttaggcgaggggcacgtctaaattggcctgaaggtgctgttacaagagaaagtatcagagcagtcagaaaactacaccggctaaaggacttggttgcgagaaatgctgactattcaaaggcatcgctggcggacttgctatatggtcttttaaagtttgagccttcagagcgccttactgcccaagaagctctagaccatccattctttcgaattccaggtccaacatgacaattggaagatgctttgattccaccgcttgccaagaacaaggcctggagaagcagcgggcacaaagcctagagcagaatgacaattgaagcagctagcataaagatgatttaagccgagctatggcgcttgcggtggtgataagctgttgttccagtcgctcaggtgtaatgtacaataacatttttcctagggaggttagtgtacttgatgtgacctgtacaatatgaagatgcggtgcaccaggggttgccgtcttaatcctgggtttgtaatcgcactacaatgatcactgaccaaggcaaggcaaggcagcagtaaaggcctgtgccgtgttctgtttctcgagaagtcttgacagggctgagaattcctacaattagaaccatgctgttgttgaaggtgtgtttgtgaacggtgcaaactgattactcggagattgggaagcactgttctgagtgttaggatttaatcaatcactcgattaaagattaatccctgcaattaatccccggcattgtggcggttcctcacgtctctttcaacagacgccttccaagattgggtcttttcccgttgtataaatttgtccttcaccatggataaagaacagatttgattcatttgtgttctcttgac

SEQ ID NO: 4615 - DNA, 3804 bp, Oryza sativa Japonica Group
gcgtcgccgccgtggagggacgacgaccgcgacgggcactacgtgttcgacctcggcgagaacttgaaccgacgatgtgagcgccaccccgttcctgtctcttggttggctgaaaggagatttgtgtgttcttagatcctgcctgcttggaaactgcagtagttttgttcagttttatgtggtgctgtagaattctactgcgaaagttcattgcaataatcgcatgagtgatttggacattgattacctagtgtaatacagtataatattgtatctgtgttctaaaaccaagggaggtgaatgaaacaaggttcccgtttggattagcaactttctgttatgttaataaactatatatgcccttgttccttgcttttgttcccagcatttattgatgctaattttagttgaaattgcaataaccgtagggctttatagctatttaggttctgtgagattgttcgttgatattcttctcttcttggctatgcagacaaaatcttgagcaaaatgggagaaggttggattttctgcaatctgttccctagtacctggtgtctttgctattattgtaatgtaaagcaacaggaatcattttaaatttttaataggtacttttgggcgtgttttggaatgctgggaccgtgaaacacatgaatatgtcgcaataaaagttgttcgtagcatccgcaagtacagggatgctgcaatgattgagatcgatgtgctcaaccgccttgcagaaaatgagagatacagatcactgtgagtacctcaaaatatttgatcccaaaaatcttagtcttttctgtttctctcctgatcagtcttccttactggccagctgtgtccagattcaaggatggtttgactatcgcaatcatatatgcattgtaagtctcaatttcattcatttatgctagttctaaaaatctataccaaatgtcagttgttgatatgcgcatttacagttccaatattccatattccacttttccctgttagttcaaagttttgtttgttggcaatttactttgctggccctccgaatattcacctttttgctcgtaggcagtgaaacatgctgctatgtacgatatggtaatgtgcttgaataggatttccatgcttataaaacagttgtcgttctttgctcataaaggtttgccgatatggaaacaaatcaaagataatttttcttcaatggatatcgatggttttgtcaggtttttgagaagcttgggccaagcttgtatgattttctaaagagaaatagataccaacctttccctgtggaacttgtgcgggagtttggacggcaactgttggaatctgtagcatgtgtgtgattgtttgattctgcatatcaattcttaacaaattcggtagctgctgattcattcttctgttgctgaaaaggagcatgcttgaccatcttttcctttctttcttctaaaatagatatgcatgaattacgccttattcacactgatctgaagccagaaaacatactccttgtgtcttcggagtatataagggttccaggttccaaggtaatgtcaatcagttttgtagtgatcatctgctattctgaaactaggcatgcggtattagcagttatgttgaatgatcccttggggttgtacagaagaattcacaagatgagatgcatttcaagtgcttaccaaagtccagtgccataaagctgatagattttggtagtaccgcctttgataatcaggaacatagctcgattgtttctacaaggcattacagagcacctgaaataatcttaggtaaattggttatcttttaaggtttgcttttattttatcttgcttgagtttggaatatccttgtgatgaaggttaatgtggcctcgagtatgctccaatggagcacaacaaaggtgcaattcaaaatccttggatgcaataattgataatgctgttagaactcttatttttagtgattcgaaatgacagaactcattaaaacaatgaaaacttcttgccatcactataatcatgttagtattggcagaagaaatagcacttggtctacttattcgtcatttttttcagtgtactatctgattatgctttatagtaaagtggtaggcatttgactgagaagaatgtttttattaacttggtatttttagagatggagcatatattcctccctagataattctgatattcttgaatatgttcctatgacaggcttagggtggagtttcccttgtgacctttggagtgtcggatgcatcattgttgagctatgctcggtttgatatcttgtcatgcatatttttcctttcttttaccttagcctatgttcctaaccataaaaaacctttagggggaagcattgtttcaaacacatgagaaccttgagcacttagcaatgatggagagggttttgggtccactcccagaacacatgataaggaaagccaggtacattgtggcagtgtgcacactactttgatgatcattttcttttacctttttctgtgttgtcctcaatatagcaagtagtaaacgaatctatgttttactgtttaatttggcatttgacaaggaaaattttaattgtatcactttttaaaaatattttttgggttttcctttctatagaacttgacttgttagtggtatgctattctgccaagttgaacccctcaatatgtccgttttcttatactagcttgtaatttaacaacagtttgttcatgtgtagacccaaccttaaatccagggttttttttaacagtttatagttactccaactcactaatactcgagtcttatatttcttttgattgatttatccatagttctcatataaagtaataataatagatgcaactcatgcgaatgctgtttctgagtacgtcatgtggctgtcatgttaactttggctatggtatgctaccatttactgtcttgcaatgatcaatcttcttcattttatactgattttccatatttgcatcgtgtatgtcaactggaatatgcagttcatcagctcagaaatattttagacgaggagcgcgtctaaattggcctgaaggtgctgtttcaagagagagtatcagagcagtcaaaaaactagatcggctaaaggttttggttccctcaattatgtctctttttttttgctacgtttatccccaatctaaattatatctctaaaattcaaaacaatattatgcatattcctgttcttcagtctatctcctgtctgctacaagtaaaagaaataccatgcatagaaacatacaaatcaagagtagaagcagaagctgtttttttttaatgtaactatgcatctatagttaatgatttgtctgaatgaaggcatattatgtttgtaaatgtttgatataaagcttatttcagttttgtcagggtgcagatagaaaaaataaagttccattttctttggtgaactggtcctcttgtagtgtagtatctgtttcatttagtgatttactatgctgtttgtgtggtaaattcagagtattattctgctggttagtaaaattattccttcaaatttccactaagaggaaatgagaaagtattagaaacatattctgaaatatctgttctgaagaagattcaacttacacacctcaaacattatggactgaaacttcaggacttagtggcgaggaaggctgatcattcaagggcggtgctggcagacttgttatatgggcttttaaaatttgagccatcagagcgtcttactgcccaagaagctctagaccatccatttttcagaaatacaaca

SEQ ID NO: 4616 - DNA, 1528 bp, Zea mays
cttctagggtttctctctgtttcgtcctcatcgaatcggagtttcgcatggagtcatcgcggtctcggaagcggacgcgccaggcgcatgactgtgccgccgcgccgccaccagagcgagaagtggtagcgaggggtggcgcgtcgccaccatggagggaggatgaccgtgatggacacttcgtattcgaccttggcgagaacttgacccgccgatataaaatcttgagcaaaatgggagaaggtacatttgggcgtgttttggaatgctgggaccgtgaaacacatgaatatgttgccataaaagttgttcgcagtatccgcaagtaccgtgatgctgcaatgattgagatagatgtgctcaatcgccttgcagaaaatgaaaagtacagatctctttgtgttcaaattcagagatggtttgactatcgtaatcatatatgcattgtttttgagaagcttgggccaagcttgtatgattttctaaagagaaatagataccaacctttccctgtggaacttgtgcgggagtttggacggcaactgttggaatctgtagcatatatgcatgagttgcggcttatccacactgatctgaagccagaaaacatactacttgtctcttctgagtatataaaagttccaagtacaaagaagaattcgcaaggtgagatgcatttcaagtgcttgccgaagtccagtgccataaagctgatagattttggcagtaccgcctttgataatcgggaccataactcgattgtttctacgaggcattatagggcacctgaaataatattaggtttaggctggagttttccatgtgatatttggagtgttggctgtattcttgttgagctatgctctggggaagcattgtttcagacacacgagaatctggaacacctagcaatgatggagagggttttgggacctctaccagaggatatgatacggaaagcaagctcttcagctcagaaatattttaggagagcaacacgattaaattggcctgaaggtgctgtttcaagagaaagcatcagagctgtgaggaaactggatcgactaaaggacttggtatcgaggaacgctgaccattcaaaggtggcactggtggacttgctatacggtctcctacggttcgagccatcggaacgcctgacagcagaagaagctctggaccatccattcttcaggaacccaacatgacttgttgagcaggcttgactcatgtgtaactctactgaaggtggtggtgggaagcaggcagagctgtccattgcaaagctgaaagcattttgctcctctataccagagagtttgtgtaaggcctgtcaatggggcttcttgtggtgataaaactgatggctttagtcacccaatgtcatgtacactagcatttttcctagggagcttagttcgccagatggcgcttgtatgttgttaaccgggatacactatgagctgtgccccgatgccctggtgccataatccaatcgcaaatgttgaaatcaaaaaaaaaaaaaaaa

SEQ ID NO: 4617 - DNA, 1524 bp, Zea mays
ctctgtttcgtcctcatcgaatcggagtttcgcatggagtcatcgcggtctcggaagcggacgcgccaggcgcatgactgtgccgccgcgccgccaccagagcgagaagtggtagcgaggggtggcgcgtcgccaccatggagggaggatgaccgtgatggacacttcgtattcgaccttggcgagaacttgacccgccgatataaaatcttgagcaaaatgggagaaggtacatttgggcgtgttttggaatgctgggaccgtgaaacacatgaatatgttgccataaaagttgttcgcagtatccgcaagtaccgtgatgctgcaatgattgagatagatgtgctcaatcgccttgcagaaaatgaaaagtacagatctctttgtgttcaaattcagagatggtttgactatcgtaatcatatatgcattgtttttgagaagcttgggccaagcttgtatgattttctaaagagaaatagataccaacctttccctgtggaacttgtgcgggagtttggacggcaactgttggaatctgtagcatatatgcatgagttgcggcttatccacactgatctgaagccagaaaacatactacttgtctcttctgagtatataaaagttccaagtacaaagaagaattcgcaaggtgaaatgcatttcaagtgcttgccgaagtccagtgccataaagctgatagattttggcagtaccgcctttgataatcggaaccataactcgattgtttctacgaggcattatagggcacctgaaataatattaggtttaggctggagttttccatgtgatatttggagtgttggctgtattcttgttgagctatgctctggggaagcattgtttcagacacacgagaatctggaacacctagcaatgatggagagggttttgggacctctaccagaggatatgatacggaaagcaagctcttcagctcagaaatattttaggagagcaacacgattaaattggcctgaaggtgctgtttcaagagaaagcatcagagctgtgaggaaactggatcgactaaaggacttggtatcgaggaacgctgaccattcaaaggtggcactggtggacttgctatacggtctcctacggttcgagccatcggaacgcctgacagcagaagaagctctggaccatccattcttcaggaacccaacatgacttgttgagcaggcttgactcatgtaactctactgaaggtggtggtaggaagcaggcagagccgtccccattgcaaagctgaaggcatcttgttcctctataccagagagtttgtgtaaggcctgtcaatggggcttcttgtggtgataaaactgatggctttagtcacccaatgtcatgtacactagcatttttcctagggagcttagttcgccagacggcgcttgtatgttgttaaccgggatacactatgagctgtgccccgatgccctggtgctataatccaatcgcaaatgatgaaatcaagcatagcgtgcgtccgtatagttt

SEQ ID NO: 4618 - DNA, 1717 bp, Zea mays
cgcctttctccatctagggtttctctctccatttccaccccatcggaccggagcttcgcatggagtcatcgcagtctcggaagcggacgcgccaagcgtatgactgcgccgccgcgctgccaccagagcgagaagtggtagcgaggggtggcgcgtcgcctccatggagggaggatgaccgcgacggacactacgtcttcgatctcggcgagaacttgacccgccgatataaaatcttgagcaaaatgggagaaggtacatttgggcgtgttttggaatgctgggaccgtgaaacacgtgaatatgttgccataaaagttgttcgcagtatccgcaagtaccgtgatgctgcaatgattgagatagatgtgctcaatcgccttgcagaaaatgagaaatacagatctctctgtgttcaaatacagagatggtttgactatcgtaatcatatatgcattgtttttgagaagcttgggccaagcttgtatgattttctaaagagaaatagataccgacctttccctgtggaacttgtgcgggagtttggacggcaactgttggaatctgtagcatatatgcatgacttgaggcttatccacactgatctgaagccagaaaacatactacttgtgtcttctgagtatataaaagttccaagtacaaagaagaattcacaagatgagatgcatttcaagtgcttgccacagtccagtgccataaagctgatagattttggtagtaccgcctttgataatcaggaccataactcgattgtttctacgaggcattacagggcacctgaaataatcttaggtttaggctggagttttccatgtgatatttggagtgttggctgtattcttgttgaactatgctctggggaagcattgtttcagacacatgagaatctggaacacctagcaatgatggagagagttttgggacctctaccagagcatatgatacggaaatcaagttcttctgctcagaaatatttcaggagggcaacacgtttaaattggcctgaaggtgctgtttcaagagaaagcatcagagctgtgaagaaactggatcgactaaaggacttggtatcgaggaacgctggccattcgaaggcagagctggcagacttgctatacagtatcctccggttcgagccatcagaacgtctgacagcgcaagaagctctggagcatccattcttcaggaacccgacatgacttgttggacaggcttgactcgtgtaactctctgcttcaagaaggtatcgaggaagcaggcagagccgtccattgcaaagctgatgggtatcttgctcctcttttaccagagagtttgtgtaagcctgtcagtaaggcttcttgcggtggtgataaagctgatggctttggtcacccaatgtaatgtacactagcattttttttttacctagggagtttagtgcctgtatgttgttaaccgggacgcgctatgagctgcgtcccaatgccctggttccataatccaattgcagatgttgaaaatcaagcatgaagggatccctgcgcagctgtgctcccgtagctgcaatagtctgttggatgcaagtatcgtgatgtcacgagtttgggatttgttgcattccgactgcatgggtggtgtgaagaatgggcatgaaatgccgtgtcctgttgttgagacttgtgtgtagctggtgaagtgttgttgttgatggagt

SEQ ID NO: 4619 - DNA, 1568 bp, Oryza sativa Japonica Group
gggtttctctctctctctctctctcctctctctctctctcctctctctccaatcgaatcggaatccatggagtcgtcgcggtcgcggaagcgggcccgccaggactgggacggcgccggcgcgccgccgccgccggcggagcgggcggtggtggcgaggggcggcgcgtcgccgccgtggagggacgacgaccgcgacgggcactacgtgttcgacctcggcgagaacttgaaccgacgatacaaaatcttgagcaaaatgggagaaggtacttttgggcgtgttttggaatgctgggaccgtgaaacacatgaatatgtcgcaataaaagttgttcgtagcatccgcaagtacagggatgctgcaatgattgagatcgatgtgctcaaccgccttgcagaaaatgagagatacagatcactctgtgtccagattcaaggatggtttgactatcgcaatcatatatgcattgtttttgagaagcttgggccaagcttgtatgattttctaaagagaaatagataccaacctttccctgtggaacttgtgcgggagtttggacggcaactgttggaatctgtagcatatatgcatgaattacgccttattcacactgatctgaagccagaaaacatactccttgtgtcttcggagtatataagggttccaggttccaagaagaattcacaagatgagatgcatttcaagtgcttaccaaagtccagtgccataaagctgatagattttggtagtaccgcctttgataatcaggaacatagctcgattgtttctacaaggcattacagagcacctgaaataatcttaggcttagggtggagtttcccttgtgacctttggagtgtcggatgcatcattgttgagctatgctcgggggaagcattgtttcaaacacatgagaaccttgagcacttagcaatgatggagagggttttgggtccactcccagaacacatgataaggaaagccagttcatcagctcagaaatattttagacgaggagcgcgtctaaattggcctgaaggtgctgtttcaagagagagtatcagagcagtcaaaaaactagatcggctaaaggacttagtggcgaggaaggctgatcattcaagggcggtgctggcagacttgttatatgggcttttaaaatttgagccatcagagcgtcttactgcccaagaagctctagaccatccatttttcagaaatacaacatgagtacatgatcatgctgactctacccctcccaatatgtacgtgaagaacccaagcctggagaaagcaggcgcaaggacattcccatataaagcagaatgccttcagctcatctgtaccataaatcttctgtaagctgagctataatgcttgtggtggtgacacggcataactgttacgttcacccgatgtaatgtacaatagcattgaatctagggaaggttgatgtagcagatggaacttgtgcattgtgagttgtgtgatacatgaggaattgcattgcgactcatgtcgcagtgacacaacaatgaccaaagcaggccatatatgccccttcc

SEQ ID NO: 4620 - DNA, 1974 bp, Hordeum vulgare subsp. vulgare
gatgcatcgcacccgcacagcgtcgccctagggtttctccgtctctttctctctctctctcccgttcctctcgtcccaatcgaatcggaatccatggagtcgtcgcggtcgcggaagcgcacgcgtcaagagttggacggcgcaggcgacccgccgccggagcgggaggtggtagcgaggggtggcgcgtcgccgccgtggcgggatgacgaccgtgacggccattacgtgtttgatctcggcgagaacttgacccgtcggtacaaaatcttgagcaaaatgggtgaaggttcgggttcccttcattatggtttctattgtgcttctcatttgtttttcctattattctaatgtacagcgacacgagttggattttcataggtacttttggccgagttttggaatgctgggaccgtgaaacacgtgaatatgttgcaataaaagttgtccgaagcatccggaagtaccgggatgctgcaatgattgagatcgatgtgctcaatcgccttgcagaaaatgagagatacagatccctctgtgtccaaattcaaagatggtttgactatcgcaaccatatatgcattgtatttgagaagcttgggccaagcttgtatgattttctaaagagaaatagataccaacctttccctgtggaacttgtgcgggagtttggacgacaactgttggaatctgtagcatatatgcacgaattacgccttattcacactgatctgaagccagaaaacatactccttgtatcttccgaatatataaaggttccaagttccaagaagaattcacaagatgagatacactgcaagtgcttgccaaagtccagtgccataaagctgatagattttggtagtactgcctttgataatcaggaacataactcgattgtttctacgaggcattacagggcacctgaaataatcttaggcttaggctggagtttgccatgtgatatttggagtgttggttgcatcctcgttgagctatgctcgggggaagcattgtttcagacacatgagaacctggaacacctagcaatgatggagagggttttgggacccataccagagcacatgatacggaaggctagttcatcagctcagaaatattttaggcgaggggcacgtctaaattggcctgaaggtgctgttacaagagaaagtatcagagcagtcagaaaactacaccggctaaaggacttggttgcgagaaatgctgactattcaaaggcatcgctggcggacttgctatatggtcttttaaagtttgagccttcagagcgccttactgcccaagaagctctagaccatccattctttcgaattccaggtccaacatgacaattggaagatgctttgattccaccgcttgccaagaacaaggcctggagaagcagcgggcacaaagcctagagcagaatgacaattgaagcagctagcataaagatgatttaagccgagctatggcgcttgcggtggtgataagctgttgttccagtcgctcaggtgtaatgtacaatagcatttttcctagggaggttagtgtacttgatgtgacctgtacaatatgaagatgcggtgcaccaggggttgccgtcttaatcctgggtttgtaatcgcactacaatgatcactgaccaaggcaaggcaaggcagcagtaaaggcctgtgccgtgttctgtttctcgagaagtcttgacagggctgagaattcctacaattagaaccatgctgttgttgaaggtgtgtttgtgaacggtgcaaactgattactcggagattgggaagcactgttctgagtgttaggatttaatcaatcactcgattaaagattaatccctgcaattaatccccggcattgtggcggttcctcacgtctctttcaacagacgccttccaagattgggtcttttcccgttgtataaatttgtccttcaccatggataaagaacagatttgattc

SEQ ID NO: 4621 - DNA, 1679 bp, Sorghum bicolor
gctcacttccaaccgggccccagcccgccacgagtccacgctcccacctgctcctcgtcgccgccattagcgcgccccgacctcgcctttctccatctagggtttctctctccgtctcctcccccatcgaatcggagcttcgcatggagtcatcgcggtctcggaagcggacgcgccaagcgtatgactacgacgccgcgccgccaccagagcgagaagtggtagcgaggggtggcgtgtcgccgccgtggagggaggacgaccgcgacggacactacgtcttcgatctcggcgagaacttgacccgccgatataaaatcttgagcaaaatgggagaaggtttgggttttccgcaatctgtcgtctcctcttctgctgggtatcttcgctattattctaatgaagaggactgcgagttggattttcgtaggtacctttgggcgtgttttggaatgctgggaccgtgaaacacgtgaatatgttgccataaaagttgttcgcagtatccgcaagtaccgtgatgctgcaatgattgagatagatgtgctcaatcgccttgcagaaaatgagaaatacagttctctttgtgtccaaattcagagatggtttgactatcgtaatcatatatgcattgtctttgagaagcttggaccaagcttgtatgattttctaaagagaaatagataccaacctttccctgtggaacttgtgcgggagtttggacggcaactgttgcaatctgtagcatatatgcatgagttgcggcttatccacactgatctgaagccagaaaacatacttcttgtgtcttctgagtatataaaagttccaagtacaaagaagaatacgcaagatgagatgcatttcaagtgcttgccaaagtccagtgccataaagctgatagattttggtagtaccgcctttgataatcaggaccataactcgattgtttctacgaggcattacagggcacctgaaataatcttaggtttaggctggagttttccatgtgatatttggagtgttggctgtattcttgttgagctatgctcaggggaagcattgtttcagacacacgagaatctggaacacctagcaatgatggagagggttttgggacctctaccagagcatatgacacggaaagcaagttcttctgctcagaaatattttaggagagcaacacgcttaaattggcctgaaggtgctgtttcaagagaaagcatcagagcggtgcggaaactggatcgactaaaggacttggtatcgaggaacgctgaccattcaaaggcagcgctggtggacttgctatatagtctcctacgatttgagccatcggaacgtctgacagcgcaagaagctctggaccatccattcttcaggaacccaacatgacttgttgagcaggcttgactcatgttgaagaaggtggtagggaggaagcaggcagagccatccattgcaaagctgaaaaggcatcatgctcctctgtaataccagaaaagtttgtgtaagcctgtcaataaggcttcttgtggtgataaagcttatggcttcagtcacccaatgtaatgtacactagcatttttcctagggagattagcgcgccagatggcgcttgtatgttgttaaccgggacgcgcaatgagctgcgtcccaatgccctggtgcccataatc

SEQ ID NO: 4622 - DNA, 1215 bp, Populus trichocarpa
atggttgcagcagttgtcgatatcgaaaggatggagaagcagcagcgtgtcagaaaacggccaagattcgcgtgggacgtaggccccgcacaaccagaggaacgggctccagtggtggctcgaaatgaggggatggcggctaggtatgtgtccccgccgagaagggaggatgatcgtgaaggacattatatgtttaatctcggcgagaatttgactccaagatataaaatattgagcaaaatgggtgaaggcacttttgggcgagttttggaatgttgggatcgccaaacacgagagtatgtggcaatcaaggtagtacgtagcattcacaagtatcgcgatgcagcaatgattgaggtcgatatacttcagcgtgttgccaagaatgaaaaagccagctcacgatgtgttcagattcggaactggtttgattaccgcaatcacatttgtattgtatttgagaagcttggaccaagtttgtttgattttctaaagagaaataaatacagcccattccctgtggatcttgttcgggaatttggacgtcagcttttggaatctgtagcatatatgcatgatttacgcttaattcacactgacctgaagccagaaaatatacttcttgtgtcatctgaatatataaagcttccaggctccaagaggagttcttcagatgaaatgcacttcaggtgcttgccaaagtcaagttccattaagctgattgattttggtagtactgcatttgataatcagaaccatagctccattgtttcaacgagacattacagagcccctgaggtcattctaggtctaggttggtcttatccatgtgacttgtggagcattggttgtatactagttgagttatgctcgggcgaagctctattccagacacacgagaacttggaacatttagctatgatggagagggtattgggacctctgccagagcacatgattcttagggctaatcgtggagctgagaaatattttcggagaggatccaggttgaattggcctgaaggagcagtttctagggaaagtatcagagctgtgaagaagcttgatcgactaaagcttatgatatctcaacacgtagacagctcaagatcttcactcattgacctgctgcatggcttgttaaaatatgatccatccgaacgtctaacagcttggcaagctcttaatcatccgttcttcaagtgtccaacttaa

SEQ ID NO: 4623 - DNA, 2976 bp, Sorghum bicolor
atgggtacaaggatgccaatcttaccccgactatcgagcacactgtccacggcgttgcttgagtggatcttgatgctcctgctgttcatcgacgcggtttacagcttcttggtcactagattcgcccgtctctgcagattaccagcgccatgccctttctgctcaaggcttgatcacgtcctgggcaacgagaaaccatgtttctatagagagttgatctgcaaaactcacaagacggagatttcatccttggccttctgcagtctccaccagaagctcgcgggagcccaaaatatgtgtgaagggtgctgtgggaaagtcacccatgatgataaaacagatgagactgtgatggatgccaatgtactttatagcaaacaaagaattgatgatgctttgaattcccctcgtgaaaaagtttgctcgtgctgtgggcagcattttaagcaacggactgtagctttgtcctctagaaagactgcagagctagagcctactggagcattcggctcaccagaaatttacacagagtattctgtagtatgtcaagtggacgagcctttggagcctaaagatatataccaccaaactgactacaggtctaatgagcgagatgatctgctacagatgacatctgactctgagattgaggtcccttgtgccaatgatgtgaaaagttcacaatctcgtgaagccagtgttgtggacgaagacttacaagaagatgcagcttgtgagcaacccgttcttccttcccctgtggtgatcaaggaatctgaaataattgtcaagaaggagcccagtgttgaagacacctgcaatacatctttggcgtgtcctgctgtggatgatcatccaaatagcggaggtgatgtggaccggacggaagaaaaagaaagcctatccagaaaattggcatcccggcatgatcctgtacttgttatagaaaattcaggtttagaagatgctggtatttcacaaattccagttatgccaagtgatgagctaccacaggttcctggtgagattgaaccatctcagagcacaagtgaaggcaacgctgatccatatacatctcagttcacaatactagaggagcactatgctgtttcagaagaaggaaatataaaaggtattctggaacaagttgatgtgccagaaattactggcagatcaagtggtgagtttcatcagagaattgcgtcagcagctgatccacatacaaatgaactggtgctagagaacgctcatcatggtgcttcagaagacgcaaatcagaaagataattgcggggatatccatgtttcacaagttagtgctggttccaaaacatgtggtgaagttaataaaattgaacccactggtgacatgggggcacacaaactgatagtccaagatccttctggtagtgctcccaaagatttaatagataaagattatgtggacgaacctcatatatcagcaactaccgtaagatcaagtggtgaaatacctcaagatcatagtgccaccgaggaatacccaaaaacaagtgacagtgttgttgaaaggagaccatctctaagcactcagattagcatgaatgaagcctatagacttgccattggcaacaagggtagcttgccatcccctaccttgacggatgtaatccttggaaaggactctacttctagcataaacgaagaactgagactactgctatcacagctctcagcttccagggggcttgaggcaccatgggtcgatccaggccctagcccacgtgcatatggacgtggtgatgagttggtggtgcagaacattaccaatagaatttcacttgagaggaatgcttccggtttggagtctctagacggaagcattgtcagtgagatggaaggtgaaagcaccattgaccggttaagacgacagattgatcttgaccggaaatcaatacacctactctgcagagaactggaagaagagaggaacgcctcagccattgctgcaagtcaagctctggctatgatcaccaagttgcaggatgagaaggctgcaatgcagatggaagcttcgcattaccaaaggatgatggaagagcaagctgaatatgacagtgaagcgctagcgaaaactaacgagttactcgctgaaagagaacaacaaatagaggaactggaaattgagctcgaaaactataggagacagtatggaggtggagcaatagaggaacgaggcaatcaagcggcttttaaacaagaaaatagggatacagctatgcttgacgttggtgatcttgaagatcctttgaagcagggcataaattccttggtgagtttggaagaggagagggcatatatagcaagtggtttgagaaaattggagcaaaagctccaattctactccaacaacagtgtttctgttgatttacccagtccagatgttaaggatgacctctctgacaaagtatatgtcatagaagacttctcgttagaccgccaggaaagctcgatagagagcaaagaagctggctcattgacaactagtgggaagattgatctagatgcagtgcaggaagaaatttcaaaattgaacagaagactgaagacactagaaggagatcgcagttttcttgaacatagcatcaactccctcaggaatggcgacgaaggtttgatgtttatacaggaaattgcttgcaatctgagagaactgcgagcaattgctattgacaagaaatagaatttaccaaactgtgtataatagtcattttcaaacttatttgtgcgataggtatcttctttctttctttctttctttctttctttctttctttctttctttctttctttctttctttcttttttttttttgcgattgcaataggtattgaatcaacatatgaattgtgcatcatgtgtatcatctaaatgaaaagaaattcttcttgtatgtaggcaccagatattgttgtaattatcttgaaggaaattcaca

SEQ ID NO: 4624 - DNA, 3276 bp, Zea mays
cgcagatcgggatctcgcggagctgcgattcattcgccagccatcctactcaaacgccacccatctctgagtctttgaccaactgttctgaagatttgagacactgttggagatgggtacaaggatgccaatctttccccgactatcgagcgcactgtccacggcgttgctggagtggatcttgatgctcctgctgttcatcgatgcggtttacagcttcctggtcactagattcgcccgtctctgcagattaccggcgccatgccctttctgctcaaggctcgatcacttcctgggcaacgagaaaccgtgcttctatagggacctgatctgcaaaacccacaagtcggagatttcgtccttggccttctgcagcctccaccagaagctcgcgggagcccgaaatatgtgtgaagggtgctgtggggaagtcgccggtgatgataagacagatgagactgatagcaatcaaagaattggtgatgctttcaattctcctcgtgaaaaagtctgctcgtgctgtggacagcattttaagcgacggagtgtagctttgtcctctagagagactgcagaactagaacctactcgagcgtttggctcaccaaaaacttacacggagtactctgtagtatgtcaagtggatgagcctttggagcctaaagatatataccaccaaagtgactacaggtctaatgagccagacggtctgctacagatgacatctgactctgagactgaggtcccttgtgccattgatgtgagaagttcacaatctcgtgaagccgatgttaagggcgaagacttgcaagaagatccagcttgtgagcaacccgttcttccttcccctgtggtgatcaagaaatctgaaatagtcgtcaggaaggagcctagtgttgaagacacctgcattacatcttcagcgtgtcctgctgtggatgatcatcctaatagcggaggtggtgtggaccagatggaagaaaaagaaagcctatccagaaaatgggcaccccagcacgatcctgtacttgttatagaaaattcaggtttacaagatgctggtatttcacaaattatgccaagtgatgagctaccacaggtttctggtgagactgaaccatctcagagcacaaatgaaggcaacacggatccatataaatctcagttcacaatactagaggagcactatgctgtttcggaagaaggaaatataaaatgtattctggaacaatttgacgtgacagaaattactagcagatcaggtggtgagtttcgtcaaagaagtgcgtcagcagctgattcacatacaaatgcactggtactagagaatactcatcatggtgcttcagaagatgcagaacagaaagataattgtggggatatccgtgtttcacaagtaggtgctggatccaaaacgagtggtgaagttgaagattatactaagaaaattgaacccactggtgacatgggagaacatgaactggtagtacaagatccttctggtagtgctcccaaagatttaatagttaaagattatgtggacgaacctcatgtatcaacaactaccatgagatcgagcggtgaagtacctcaagatcatagtgccaccgaggaaaacccaaaaacaattgacagcattgttgaaaggagaccatctctaagcagtcagattagcattaccctaagatcaagtggtgaagtacttcaagatcatagtgccaccgaggaaaacccaaaaacaagtgaaagtattgttgaaaggagaccatctctaagcagtcagattagcattaccctaagatcgagtggtgaagtacttcaagatcatagtgccaccgaggaaaactcaaaaacaagtgaaagtattgttgaaaggagaccatctctaagcagtcagattagcatgaatgaagcctatagacttgccattggcaacaagggtagcttgacatcccctacattgacggatgtaatccttggaaaggactctacttctagcataaacgaagaactgaggctactgttatcacagatctcagcttccagggggcttgaggcaccatgggccgatccaggccctagcccacgtgcatatggacgtggtgatgagttggtggtgcagaacattaccaatagattatcacttgagaggaatgcttccggtttggagtctctagacggaagcattgttagtgagatggaaggtgaaagcaccattgaccggttgagacggcagattgatcttgatcggaaatcaatacacctactctgcagggaactggaagaagagaggaatgcctcagccattgctgcaagtcaagctctggctatgatcaccaagttgcaggatgagaaggccgcaatgcagatggaagcttcgcattaccaaaggatgatggaagagcaagctgaatatgacagtgaagcggtagcgaaagctaacgagttactcactgaaagagaacagctaattgaagaactggaagttgagctcgaaaactataggagacagtatggaggtggatcaacacagagacgaggcaatcgagtggcttttaaacaagaaaatagggatacaactatgcttgacggtggtggtcttgaagatcctctgattaacacacaacagggcataaattccttggtgggtttggaagaggagagggcatatatagcgactggtttgagaaaattggaacagaagctccaattctactccaacaacagtgtttccgttgagttacccagtccagatgttaaggatgacctctccgacaaagtatatgtcacagaagacttctcgttacactgccaggaaagctcgatggagagcaaggaagctggctcatcgacaactagtggggaggttgatctagttgcagtgcaggaagaaattgcaaagttgaacagaagactgaagacactagaaggagatcgcagttttcttgagcatagcatcaactccctcaggaatggcgacgaaggtttgatgtttatacaggaaattgcttgcaatctgagagaactgcgagcaattgctattggcaaaaaataaaatgcaccaaaatgtgtataatagtcattttctcgaaacttatttgtgcaatagacgccgaatcaacatatgaatcgtgcatcatgtttgtcatataaatgaaaagaaattcttgtaattagacaccagatgttgctgtaattatctttaaattcgtagggttgagatgtaaattggttctatatattatcatgttattatgttaagtttttgctatgaaa

SEQ ID NO: 4625 - DNA, 1379 bp, Hordeum vulgare subsp. vulgare
ggcagatctgcccgacccgactccgggaacctggagtgcacgcgaggggagcagtaggtggggtttgggtctacccacgacgtccaccggccgtcgcgatggccggcgccgcctggccgctctccgccgcctcggccctcctccccgcccccctctcgctgaccctcctcctcggctccctcgtcgtcgtcctcgcgctgggcgtcgccgccgtattcctcgagcacatccgcaagatcggatgcatgcactcgattgagaggagcgccgtctcggacgccttcttcgaggaccccggctcgctcaagaaggttccctgcccgtcgatttttgaccctgccgagaagtacatttcgttgatcgttcccgcttacaacgaggagtgtcggcttcctgaggctcttacagagacgctcaactacctgaaacaacgctcatctgccgacaagtcgtttacttatgaggtcttgattgtcgatgatggaagtactgaccgtacctcgaaagttgcctttgagtatgtaaaaaagcacaatattgacaatgttcgagttctcctactcggaaggaaccatgggaaaggtgaagccgtcagaaaagggatgctccattccaggggtgaactcctactgatgcttgatgctgatggtgcaactaaggtcactgatttggcaaagcttgaagctgaggttcgtgcattggcagggaaagccaagtccagtctagcaccctctgctagttcacctcagaggctttctgatgttgaaattgctgtttttggttcccgtgctcatctggagaagcaggctcttgccacgaggaaatggtatcgaaacttccttatgaaaggtttccacttggtagtactgttgactgctggtcctggaatcagagatacacagtgtggcttcaagatgttcactcgatctgctgcaaggaaactcttcacaaacatcagattaaagaggtggtgttttgatgttgagattgtatacctgtgcaagcacctgaggatcccgatggcggaagtatctgtgagctggacggagatacctgggtccaaagtgcgcatgacaagcattttgcacatggtgtttgagctcctgctgatcagagtaggctatgggctgggcatatggaagatttactcctagactccatgttgcgaaatcatttcagttagttccatcgctccagcacataccagtcattacagcttagttctcgatcgctgcagcgtatacaccaaacttagttcgtcgccgcgaaatacagttgccaaattagttcaaggagcattgtaaaactttctgagattttcactggagagaagaatcctgtatgttggtgtttgatcatagcgagatcttgacagatgt

SEQ ID NO: 4626 - DNA, 1406 bp, Zea mays
gcccgtctgccttcggcgtgcagatctccccaactccaggaccagaaaacccacgcgaagaccagagcagcgggtggactcggcaccggccgtcgggaccgcgacgatggccgccgcctggcctctctccgccatcgccggcatcctgccggcctccctctcgctgaccctcctcctcgccaccctcgtatccatcctggtgctgggcgcagcggcgttcttcttcgagcacatccgcaagataggatgcatgcactcgctggagaggtccgccgtctcggacgccttcttcgaggaccccaactcgctcaagaaggtgccctgcccgtcggttttggatcctcctgagaaatatatttcgttgatagttcctgcctacaatgaggagtatcgactccccgaggctcttacagaaacactcaactacttgaagcggagatcaactgctgacaagtccttttcatatgaggtattgattgtcgatgatggtagcactgatgggacctctaaagtcgctttcagttttgtaaagaaacacaagattgataatgttagagttcttctacttggaagaaatcatgggaaaggtgaagcagtccgaaaaggaatgcttcattcacgtggtgaactattactcatgcttgatgctgatggtgcaactaaagtgaccgatttggaaaagcttgaagctcaggttcatgcattggctaagaaagctaagtctagcccagggacatctactagttcatctcagaatctatctgatgttgaagttgctgtttttggttcccgagctcatctagagaagcaggctcttgcgacaaggaaatggtatagaaactttcttatgaaaggtttccatttggtagttttgttgactgctggtcccgggatcaaagatacacagtgtgggtttaagatgttcacacgagcagctgcaaggaagcttttcacaaatatcagattgaagaggtggtgtttcgatgttgaacttgtatacctgtgcaagcgcctcaggatcccaatggtagaagtatccgttaattggaccgagatacctggatccaaagtgcgcatgacgagcatcatgcacatggtattcgagctcctgctgatcaaagtaggttatggactggggatatggaaaatcggctcgtagatccttgacattctatgctgactagtttctgcaactcagtttggaggaatactgtacaattttccgcaaaacctagttggtcgccagcaaatccatttggaggaatactgtacaattttccgagattttcaaatcgagagcatcaattcacatgtaccctagtgtttgatcatagagacgttgacagatgtaggccaaaattgttgtcccagctatatccttttactgatttgttatacaggaactc

SEQ ID NO: 4627 - DNA, 1348 bp, Oryza sativa Japonica Group
ggacccaggcagatctccccatctccgggacgggacccggcgcgcacgcgacccgacgcgacgacgcaagcagcagtggtgggtaagggtggactcgactccggccgtcgcgatggcggccgccggctggccgctctcctcctccgtcgccgacctcctccccgcctccctctcgctcaccctcctcctcgcctccctcgtggtcgtcgtggtgctggccgccgccgccttcttcttcgagcacatccgcaagatcggatgcacgcactcgctggagaggactgaagtctcggccgctttcttcgaggaccccaactcgctcaacaaggttcgttgcccttcaatttacgaccctgctgagaagtacatttcgttgatcatccccgcttataacgaggagcaccggcttcctgaggctctcacagaaacactcaactacctgaaacaacgttcagctgtcgagaagtcatttacttacgaggtcttgatcgttgatgatggaagtactgatcatacatcaaaagttgccttcgagtttgtaaggaaacataaaattgataatgttagagttcttctacttgggagaaaccatggtaaaggcgaagcagtcagaaaaggcatgctccattcacgtggtgaactgttactcatgcttgatgctgatggggcaactaaggttactgatttggaaaagcttgaagcccaggttcgcgcattggctaaaaaggctgagtccagcctagcaccatctagcagtccatctcagagactatctgatgctgaaattgctgtttttggttcacgtgctcatctggagaagcaggctcttgccacaaggaaatggtatcggaattttcttatgaaaggtttccacctggtagttttattgacagctggtcctgggatcagagacacacagtgtggtttcaagatgtttactcgagctgctgcaaggaaactttttacaaatatcagattgaagaggtggtgttttgatgttgagcttgtatacctatgcaagcatctcaggatcccaatggctgaagtatctgtaaactggactgaaatacctggatccaaagtgcgtatgacaagcatcctgcatatggtatttgagctcctgctgatcaaagtaggttatggactgagcatatggaaaatctattcatagaccatatgcacggtacgctgacaatcaccatagcttatcatcactggactgtataccaagcttagtctcacatgtaaaatttttccaagattttcacctagagagaatccatttgtggcgctgagtattccatcatagatttcaacaaagatatagatcacgtgtattgttcctgct

SEQ ID NO: 4628 - DNA, 2508 bp, Oryza sativa Japonica Group
acatccgcaagatcggatgcacgcactcgtaagcgattctgtgactccccccaatcctgtcgttgtttttgctcatggcgatctgcgtgcgtgcggttgtttgactggtgtgttgtttctggatctcggccgcctgcaggctggagaggactgaagtctcggccgctttcttcgaggaccccaactcgctcaacaaggtaagcgagggattctgtttacccacttcaaactgagtatccttttcccgctatttgtttccggttgctcggactgtgaatgttgtgcgcgttaggtgtttgttcatttgctcctgtaaactgtgctaggttcgttgcccttcaatttacgaccctgctgagaagtacatttcgttgatcatccccgcttataacgaggagcaccggcttcctgaggctctcacagaaacactcaagtaaggctctgatatgagcatttcctgttcctgttgctccgttgtttggagtatctttgaatgatacagtggctgtgttgttctggtcattgctctgttatgttaatctctgtgttcttttgtttctctggtagctacctgaaacaacgttcagctgtcgagaagtcatttacttacgaggtatgtcagggcagaacatgctaacagctttatttgacacagtaatacatcagggaagaaaacgttaggctgattttgcaagcaaaactaatcaagcgtaaatgagaaagtatgcatttcaccatcatgagatatgttagcgagctggttaatcacttcgccacaatggtgacaccgtggcagtccattagtcttgcaatagtaactgtttctatgtcatatattcactttttacctgagatatatcaatatcttgtttggaatgacatttgaatcactgaatttgttagctaggaaatgcacagtgtgggagccaaacactattgatccaataaagcatttacctaaactggtgtgtcaggttgctcggaccttaaagataggactttgtatctagggtagtgatgttttgttgataccgcttgctctttagatcaattgagaccataagctatgatgcctttgcaatgcttctgaacatatcagccatatctctcaattatatcatgctctttaaacacatattatgtataactcttattaacatttgcactattatatactgcataacaccataaccagatatttggcatattattattgcagaaccttttattcataaatcctgcttaaattagctaacattggaaatcggagaactgatttgcttttactgaatttcataaaggtcttgatcgttgatgatggaagtactgatcatacatcaaaagttgccttcgagtttgtaaggaaacataaaattgataatgttagagttcttctacttgggagaaaccatggtaaaggcgaagcagtcagaaaagtgagtaaatgtaccagtcgatcccccccccccccccaactcccctcactagttcaataaacacacccaccctcacccaaactagttcaatgaaataagcactgattaattctttcccatctgtggaaaaattgtacagggcatgctccattcacgtggtgaactgttactcatgcttgatgctgatggggcaactaaggttactgatttggaaaagcttgaagcccaggtctgtcataagttaaatcaaaacatgttttataaagttttgttatgcatactttgatcgtgattggtaacatcttggaatcatatcgtgctcctaggttcgcgcattggctaaaaaggctgagtccagcctagcaccatctagcagtccatctcagagactatctgatgctgaaattgctgtttttggttcacgtgctcatctggagaagcaggctcttgccacagtaagtgccccccaccccaaaacaaaaaaccttttcaatcgtgcgtttttgttctcttagattttcatgttgtgttgtatttgtgcttttcctggcgtactgcagaggaaatggtatcggaattttcttatgaaaggtttccacctggtagttttattgacagctggtcctgggatcagagacacacaggtatgctttgcaaacataagtcgtaccattaattcatgtggacagttttgctttggtattgtgctatgaactaaattccattttcttattgctaatttagtgtggtttcaagatgtttactcgagctgctgcaaggaaactttttacaaatatcagattgaagaggtacctttgttgttatgttctctaaatattgtcatgcttctgtttatcaaatcctgtcttatttttggcgtgtaaccaggtggtgttttgatgttgagcttgtatacctatgcaagcatctcaggatcccaatggctgaagtatctgtaaactggactgaaatacctggatccaaagtgcgtatgacaagcatcctgcatatggtatttgagctcctgctgatcaaagtaggttatggactgagcatatggaaaatctattca

SEQ ID NO: 4629 - DNA, 1725 bp, Zea mays
cccgccgcacccgccaggcggcgcgggcgcgcggcaatggccgcgcagaacgctgggatcatcatcgattgtcgacaggcgatgtcccccgatcccccggccgtggagttggaggtcatcggctcatcttctccgtccatcacgccatgtcccgctgcagcggcgcccgccgacgccgatttcgatcatgacggatgcaccgcggaattatcttcttcaactgatcgagaattacaggaccatatcagacagtgggaagggtcctatgggcagggtgtactccgtaggatgccggatggtggcgagaagatgcattcacgtgtcctccggatgaagaaggagctcgagcggcggagggccagacagaggatggatgtcacgcccttgagacagacagtgcaagctaagcgtactggtggcagcagtggagaaatctacaacttaaagtctgatgatgagaccatggacagtacggctagcaaacactatccaaactcaagttgtactacatctacaaagacctatacccaggttaagggagctgcatatgaagaacaaagttctttaagccatggcaaatatgcttacccaaagaatggtggtcaaatttcaaaagagtcgttgaggcatcaatcaaaaacgtggaaccttgccaaaaataaggcctcacccttggagattaaaaaggatgtagttctgttggatgacgatgatgatatagagcctgctagatcagctgatgttcagatatctaataagtgggaggagtcaaatatccactatccttcaagcactgatccagaagcggttgaactgacctactctgacatgaaatgtcttgaaccagaagaatatttaaaatcacctgttataaatttttaccttcagtacctcaagaaggcaagacctcgcagggatttacacatgtttaacacctatttttatagcaaactcgaagaagcactatccatgccgggtcaccatgactcagaattcagcaagttacggagatggtggagaggtgtagatatttttaagaaagcgtacataattttgccgattaatgaatcgatgcactggagcttgatcattgtttgcatgcctacaaaagaggcagattctgggccaataatacttcacttggactctcttggtcttcactccagtcaaaagctttttgacatagttgcgaggtatattcaagcagaacggtggcacctagggatggattcgtcttatgatattccattttcagggaggatatggaggcgtctttcgaaaaatatcaatagggaaaagattgaggtgccacgtcagcgtaacgagtatgattgtggcctctttatgctttactatattgacaggtttattcaagatgcgccagagaggttgacaaaagagggccttggcatgtttggacgcagatggttcaaccatgaagaggcttcagcgtttcggggagggatacgggcgctactgattgatctatttcatagtgctctagacgacgatggaccatcggaggcagagcttgaagacaaggacattcagatggactgagcctgctgttgctgctttgattgaatatgtaacctcgttcactcccaagtgaagtttggccgtggagggaatgcgccccgttggctacacacttttgtttacacgctcgttcattcggcggtggaaatgtacagttcaacgttatctaagggcctgtttggaacc

SEQ ID NO: 4630 - DNA, 1980 bp, Zea mays
ctttttccacttccccaactttacgccgcctctcatccccatctagtgtcctaatcgaaaaccccgtttgttagcttgaacagaagcctcccccgccgcacccgcccggcggcgcgggcgcgcggcaatggccgcgcagaacgctgggaccatcatcgattgccgacaggcgatgtcccccgatcccccggccgtggagttggaggtcatcggctcatcttctccgtccatcaggccatgtcccgctgcagcggcgctcgccgacgccgatatcgatcatgacggatgcaccgcggaattctcttcttcaactgatcgagaattacaggaccgtatcagagagtgggaagggccctctctgcagggtgtactccgtaggatgccggatggtggcaagaagatgcagtcacttgtcctccggatgaagaaggagctcgagcggcggagggccagacagaggatggatgtcacgcccttgagacagacagtgcaagctaagcgtactggtggcagcagtggagaaatctacaacttaaagtctgatgatgagaccatggacagtacggctagcaaacactatccaaactcaagttgtactacatctacaaagacctatacccaggttaagggagctgcatatgaagaacaaagttctttaagccatggcaaatatgcttacccaaagaatggtggtcaaatttcaaaagagtcgttgaggcatcaatcaaaaacgtgcgcttatcttccaaagagtacatgctctgaacatttaaatatggatattgacagaagaaaaacaccaactttaaagagccgcaacataaatcaacaggaaaatagtactattgataaatgcaccaatgccacgtttggtagtaacaggaggtggaaccttgccaaaaataaggcctcacccttggagattaaaaaggatgtagttctgttggatgacgatgatgatatagagcctgctagatcagctgatgttcagatatctaataagtgggaggagtcaaatatccactatccttcaagcactgatccagaagcggttgaactgacctactctgacatgaaatgtcttgaaccagaagaatatttaaaatcacctgttataaatttttaccttcagtacctcaagaaggcaagacctcgcagggatttacacatgtttaacacctatttttatagcaaactcgaagaagcactatccatgccgggtcaccatgactcagaattcagcaagttacggagatggtggagaggtgtagatatttttaagaaagcgtacataattttgccgattaatgaatcgatgcactggagcttgatcattgtttgcatgcctacaaaagaggcagattctgggccaataatacttcacttggactctcttggtcttcactccagtcaaaagctttttgacatagttgcgaggtatattcaagcagaacggtggcacctagggatggattcgtcttatgatattccattttcagggaggatatggaggcgtctttcaaaaaatatcaatagggaaaagattgaggtgccacgtcagggtaacgagtatgattgtggcctctttatgctttactatattgacaggtttattcaagatgcgccagagaggttgacaaaagagggccttggcatgtttggacgcagatggttcaaccatgaagaggcttcagcgtttcggggagggatacgggcgctactgattgatctatttcatagtgctctagacgacgatggaccatcggaggcagagcttgaagacaaggacattcagatggactgagcctgctgttgctgctttgattgaatatgtagtaacctcgttcactcccaagtgaagtttggccgtggagggaatgcggctacacacttttgtttacacgctcgttcattcggcggtggaaatgtacagttcaacgttatctaagggcctgtttggaacaaaaaaaaaaaaaaaaa

SEQ ID NO: 4631 - DNA, 1614 bp, Sorghum bicolor
atgtccgcgtcgagcggtgggatcgtcatcgaccggcgacaggcgatgccccccgattccccggcggtggagttggaggtcgtcggctcaccctctccatccgtcgcgccatgtcccgcggcggcggcgggcgccgacgccgacatcgatcatggcgggggcgcggcggaattcgagcaagtgagtgataaaaaattacaggagcgtattagccgctgcgaagggatgttgaagcagggtataccccagaggacgccggatggtggcgagaagatgcaggcatgcgtcctccggatgaagaaggagctcgaacgacggagggccaggcagtggaaggatgacacggttttgagacaggcagtgcaagctaagtgtactggtggcagcaggggtgaaatctacgacttaaagtctgatgatgaaaccatggatagtacgggtagcaaattctatccaaactcaagttttactccagctacaaagacctgtacccaggttaagggagctgcatataaagaagaaagttctttaagccatgccaaatgtgcttacccaaagaatggtggtcaaatatctcaagagtcgttgaatcctcaactaaaaacttgtgctcatcttccaaagagctgcaccataaaccaacaggagaatagcactgtccataaacgcatcaatgccacctttggtagtaacaggaggtcgaaacttgccaaaaataagcccttgccttctttgaagattaaaaaggatgtagttctcttggatgacgatgatgatacagagcctgctagatcagctgatgttcagatatctaataagttggatgagtcaacgatccactatccttcaagcactgatccagaagcagttgaactgagctactctgacatgaaatgtctggaaccagaagaatatttaaaatcacctgttataaatttttgccttcagtacctcaagaaatcaagacctcgcagggatttatacatgtttaacacctatttttatagcatacttgaagaagcactatccacgccgggtgaccatgactcaaaattcagcaagttacgaagatggtggagaagtgtagatatttttaagaaagcatacataattttgccgattaatgaattgatgcactggagcttgatcattgtttgcatgcctacaaaagagtcagattctgggccaataatgcttcacttggactctcttggtatgcactccagtcaaaagctttttgacattgttcagaggtgtattgaagcagaatggcggcacctacagaaggattcttcttatgatattccattttcagggaggatatggaagcatctttcaagaaatatttatggggaaaaggttgaggtgccacgtcagcataacgactatgattgtggcctctttatgctttactatattgacaggtttattctagaggcaccagagaggttgacaaaagagggccttgggatgtttggacgcagatggttcgaccataaaaaagcttcagcgcttcgggaacggatacggcaattactgtttgatctatttgatattgctccagacgaggatggaccatcggagccagagcttcatccaggtgaagacaaatga

SEQ ID NO: 4632 - DNA, 1593 bp, Zea mays
atttttcccaccttcccaaacgccacttaaaagagaaaggagagcatcgcagtgacacacgcgcaatggaaggctcgccggtgacgcgcctcccggaggctaactccctccccgacggcttcgttcccgactccgagagccctggcacggacgcgacgtttcccttctccgcgcccatcgttgatgatgcgctcaactccgatatccccgccgcgaccaacccaggcggcgaggaaaccctaaacgatccccccctccctgcgtccagcgccgaagatgcctcctcggccgccgctgctgaagccttgggcacactttctctggacgctgccgccgagccagaacgcgctctagaggagaacggacccaccggcgctgcaagaggtgaagcatccttgaagaattgtgcatcagagctagtgggcgctccaactgctcaaaaagggagcgttgagccgaaacgtaaggttgtgaaacgtagcaagcttgagaaggatagagagttgtttgaactggcccaacaataccacaaagttgttgcagaaagggatgcagccattggagttaaagaaaaactagaatctctttgtagggagtttcagcgtcaaaacaaaatgctaaaggaagagtgccaaagggtgtcgacggagggacagaacatgcgtatggaattgtctgaaaaatttgatatcgccataaagggtgtcagtgtcaagcttgaggagcagagggttgagtgcattgctcagctagaagagaacaatatgttgagaagtaaactcaaagacattgctgatcagtataacattactcagcagaaatatgctcaccaattgaaagagaaaatgatggaacttgagcttgctgatctgaggcttcaacaacatcaagagaaggctgctcacgaacatacccaaatgcagttgtatgccgagcaagtttctcagcttatgactactgagaagaacctgcggttgcaactagcttcggatggagaaagatttcagcactttcaggatgccctgtcaaaaagcaatgaagtctttgaaacttacaagcaggagatggaaaaaatgattttggtgataaaaaatcttaagaaggacaatgaatttctgaagggaaaatgtgagaactcagatattgctcttgtgaagctcattgaagagcgtgagctaacgaagaagcaaatagagaaattgaaaaaccaaaaggagacacttgagtccctgtgtcgatcactacaggcagaaaggaaacaaggccgctccgccagtattccagacgccccttctagccaagaagacatgccagcgacaagtcaagaatcttagcatatgtgcttgccaatattccgttggtgtccgttacagcttgccgggacttctgaagcctgagaaatgaatatgttactgatatcttgttttgcttgagtttgcggaagttctggtcccatttaacacatactcagctgtcaacctactcaggcctttggggattgtaactataacctagagttgcattcctctacaagtaactcggtattgttactaaccatataagctatccgttgttccaaaaaaaaaaaaaaaa

SEQ ID NO: 4633 - DNA, 1773 bp, Zea mays
gacagaattcagggaaaggaggactggaggagggcgcggcggcgacgagcttagcgatacagcggcaccggagagctagccgcagcctcgatgctcgcggggatctgaactagtgccgctgcccaatcgcgccgaggactgtggcgctcactcctcatatcccatttccagcactcgtttctccatttcccaccttcccaaacgccacttaaaagagaaaggagagcatcgcagtggcacacgcgcaatggaaggctcgctggtgacgcgcctcccggaggctaactccctccccgacggcttcgttcccgactccgagagccctggcacggacgcgacgtttcccttctccgcgcccatcgttgatgatgcgctcaactccgatatccccgccgcgaccaacccaggcggcgaggaaaccctaaacgatccccccctccctgcgtccagcgccgaagatgcctcctcggccgccgctgctgaagccttgggcacactttctctggacgctgccgccgagccagaacgcgctctagaggagaacggacccaccggcgctgcaagaggtgaagcatccttgaagaattgtgcatcagagctagtgggcgctccaactgctcaaaaagggagcgttgagccgaaacgtaaggttgtgaaacgtagcaagcttgagaaggacagagagttgtttgaactggcccagcaataccacaaagttgttgcagaaagggatgcagccattggagttaaagaaaaactagaatctctttgtagggagtttcagcgtcaaaacaaaatgctaaaggaagagtgccaaagggtgtcgacggagggacagaacatgcgtatggaattgtctgaaaaatttgatatcgccataaagggtgtcagtgtcaagcttgaggagcagagggttgagtgcattgctcagctagaagagaacaatatgttgagaagtaaactcaaagacattgctgatcagtataacattactcagcagaaatatgctcaccaattgaaagagaaaatgatggaacttgagcttgctgatctgagacttcaacaacatcaagagaaggctgctcacgaacatacccaaatgcagttgtatgccgagcaagtttctcagcttatgactactgagaagaacctgcggttgcaactagcttcggatggagaaagatttcagcactttcaggatgccctgtcaaaaagcaatgaagtctttgaaacttacaagcaggagatggaaaaaatgattttggtgataaaaaatcttaagaaggacaatgaatttctgaagggaaaatgtgagaactcagatattgctcttgtgaagctcattgaagagcgtgagctaacgaagaagcaaatagagaaattgaaaaaccaaaaggagacacttgagtccctgtgtcgatcactacaggcagaaaggaaacaaggccgctccgccagtattccagacgccccttctagccaagaagacatgccagcgacaagtcaagaatcttagcatatgtgcttgccaatattccgttggtgtccgttacagcttgccgggacttctgaagcctgagaaatgaatatgttactgatatcttgttttgcttgagtttgcggaagttctggtcccatttaacacatactcagctgtcaacctactcaggcctttggggattgtaactataacctagagttgcattcctctacaagtaactcggtattgttactaaccatataagctatccgttgttccttgttttttgttcg

SEQ ID NO: 4634 - DNA, 2023 bp, Sorghum bicolor
agtgaccctagaccttcgcgttctcgtttgcgagccccaaaaattcctccccccccaaaaccccccgaacaagagagaattcggtgaaaggaggagggcagcggcgccggcgtccacctcgcagcaccggcgagctagccgcggcatccatgctcgcggggatctgaactagccgccgctgccccatcgcgccgacgactgcggcgccggcgtcctctcctcatatcccatccatccaaagcactcatttctccgtttcccacttccgaaacgccacctaaaaagagagggaaaggagagcatcgcagtgacacacgcgcaatggaaggctcgccggtgacgcgcctcccggaggctaacaccctacccgacggcttcgtccccgacgtcgagagctcaggcacggacgcggcttctccctcctccgcgcccattgctgctgatgcgctcgactccgatatccccgccgcgaccaaccccggcggtgaggaaaccctaagcgatctctcccttcctgcgtccgccgccgaagatgcctcctcggccgccgctgctgaagccttgggcacactttctctggccgctgctgcggagccggaacgcgctctaggggagcacggacccaccggcgctgcaagaggtgaagaaaccttgaaggagaactgcgcatcagagcaagtgggtgctccaactgctcaaaaggtggtcaaggggagcggtgaaccaaaacgcaaggttgggaagcgtagcaagctcgagagggacagggagttgtttgaactggcccagcaataccacaaagtggttgcagaaagggatgcagccatcttagtcaaagaaaaactagaatctctttgtagggaatttcagcgtcaaaacaaaacgctaaaggaagagtgccaaagggtatcgacggagggacagaacatgcgtatggcattgtctgaaaaatttgataacgccataaagggtgtcagtgccaagcttgaggagcagagagttttgtccattgctcagctagaagagaacaatatgttgagaagtaaactcaatgaccttgctgatcaatatagcattactcagcagaaatatgctcaccaattgaaagagaaaacgctggaacttgagctagctgatctgagacttcaacaaaatcaagagaaggctgctcaggaacatacccaaatgcagttgtatgctgagcaagttgctcagcttatgactactgagaagaacctgcggttgcaactagcttctgatggagatagatttcagcactttcaggatgccctgtcaaaaagcaatgaagtctttgaaacttacaagcaggagatggaaaagatgatttcagtgataaagaatcttaagaaggagaatgaatttctgaagggaaaatgcgagaactcagattttgctcttgtgaagctcattgaagagcgcgagctaacgaagaagcaactagagaaactaaaaaatcaaaaggagaagcttgaatccctgtgtcgatcactacaggctgaaaggaaacaaggcccctccgccagtatcccagatgccccttctagccaagaagatgtgtcagcgacaagtcaagaatcttagcacttatgtgcttgtcaatacaccgttggtgccagctacagcttgccgagatttctgaagcctgagaaatgaatatgttacttgtatcctgttttgcttgtgtttgcggaagttctgggcacatttaacacacactcagctgtcaacctactgtccacctcaggccttttgatactgtagctagagcctagaggtgcattcctctacaagtaactcggtattgttaccaaagcatataagctgtcagctgttccttttcttgttttcgtttgagacaaaggctgttgctttgtgggtgtgttgattcctctaatcttttgttcctgttttggccttaataaatggccattttgtaccatgctttctcgcaactattgtgttcaaaattaaaacagctttaattttggatagacaagaagct

SEQ ID NO: 4635 - DNA, 1933 bp, Zea mays
ggggaattaaaggagggcgcggcggtggcgagcaccttccgctcagcgaggtagctgcacctgcaccggcgagctagccgcggcctctatgctcgcggggatctgaactagccgccgctgccccatcgcggcgatgactgcggcgccctctcctcatatcccattcccaacacaacactcattttctccattcccacgtaaaagatagaaaggcgagcatcgcagtgcacacgcgcaatggaaggctcgccggtggcgcgcctcccggaggctaattctctccccgacggcttcgtccccgacagcgagagctcagacacggacgcggctcctccctcctccgcgcccatagttgacgatgcaatcgactccgatagtcccgacgccaccaaccccggtggtgaggaaaccctaagtgatccctcccttcccgcgtccaccgccgaagatgcctcctcagccgccgctgctgaagcattggacacactttgtctggacgttgttgcggatccggagcgcgctctaggggagcacggacccaccactgctgcaagaggtgaaggatccttgaaggaaaatcgtgcatcagagcaagtgggcgctccaagtgatcaaaaggggagcggtgagccaaaacgcaaggtcatcaagcatagcaagcttgagaaggacaaagagttatttcaactagcccagcaataccacaaagtggttgcagaaagggatcaagccattgcagtcaaagatagactagaatctctttgtagggaatttcagcgtcaaaacaaaatgctaaaggaagagtgccaaagggtatcgacagagggacagaacatgcgtacggaattgtctgaaaaatttgatcatgccataaagggtgtcagtgccaaacttgaggagcagagagttgagcgcatttctcagctagaagagaacaatacgttgagaagtaaactgaaagaccttgctgatcaatataacattactcagcagaaatatgctcaccaattgaaagagaaaatgctggaacttgaacttgctgatctgagacttcaacaacatcaagagaaggctgctcaggaacatacacaaatgcagttgtatgctgaacaagtttctcagcttatgactactgagaagaacctgcggttgcaactagcttctgacggggaaagatttcagcactttcaggatgccttgtcaaaaagcaatgaagtctttgaaacttacaagcaggagatggaaaagatgatttcagtgataaagaatcttaagaaggagaacgaatttctgaagggagaatgtgagaactcagatattgctattgtgaagctcattgaagagcgtgagctaacaaagaagcaaatagagaaattgaaaaatcaaagggagaagctcgaatccctgtgtcgaacactacaggcagaaaggaaacaaggcccctccgccagtattccagatgccccttctagccaagaagtgtcagcgacaagtcaagaatcttaacattccagttgccccttctagccaagatgtgtcagcaacaagtcaagaatcttggcagttgtgcttgtcaatataccgttggtgccagctacagcttgcggagatttctgaagcctgacattcagctgtcaacctaccgtccgtctcaggccttttgatattgtggctagagcctagtggtgcattcctactcggtgttgttaccaagcatataagctctcggctgattccatctcttgtttttgtttgagacaaagcctgctgcattggagataattagatttttgccaatcataatattgtcttcttgttataattaccactgtgtctatgaattgtgggtctagctgggtctatgaaatgtgagtctgatgacaattttacaaacttgtttcttgctgatggtaaatatcagaatctctcgctg

SEQ ID NO: 4636 - DNA, 1779 bp, Zea mays
gagcaccttccgctcagcgaggtagctgcacctgcaccggcgagctagccgcggcctctatgctcgcggggatctgaactagccgccgctgccccatcgcggcgatgactgcggcgccctctcctcatatcccattcccaacacaacactcattttctccattcccacgtaaaagatagaaaggcgagcatcgcagtgcacacgcgcaatggaaggctcgccggtggcgcgcctcccggaggctaattctctccccgacggcttcgtccccgacagcgagagctcagacacggacgcggctcctccctcctccgcgcccatagttgacgatgcaatcgactccgatagtcccgacgccaccaaccccggtggtgaggaaaccctaagtgatccctcccttcccgcgtccaccgccgaagatgcctcctcagccgccgctgctgaagcattggacacactttgtctggacgttgttgcggatccggagcgcgctctaggggagcacggacccaccactgctgcaagaggtgaaggatccttgaaggaaaatcgtgcatcagagcaagtgggcgctccaagtgatcaaaaggtggtcaaggggagcggtgagccaaaacgcaaggtcatcaagcatagcaagcttgagaaggacaaagagttatttcaactagcccagcaataccacaaagtggttgcagaaagggatcaagccattgcagtcaaagatagactagaatctctttgtagggaatttcagcgtcaaaacaaaatgctaaaggaagagtgccaaagggtatcgacagagggacagaacatgcgtacggaattgtctgaaaaatttgatcatgccataaagggtgtcagtgccaaacttgaggagcagagagttgagcgcatttctcagctagaagagaacaatacgttgagaagtaaactgaaagaccttgctgatcaatataacattactcagcagaaatatgctcaccaattgaaagagaaaatgctggaacttgaacttgctgatctgagacttcaacaacatcaagagaaggctgctcaggaacatacacaaatgcagttgtatgctgaacaagtttctcagcttatgactactgagaagaacctgcggttgcaactagcttctgacggggaaagatttcagcactttcaggatgccttgtcaaaaagcaatgaagtctttgaaacttacaagcaggagatggaaaagatgatttcagtgataaagaatcttaagaaggagaacgaatttctgaagggaaaatgtgagaactcagatattgctattgtgaagctcattgaagagcgtgagctaacaaagaagcaaatagagaaattgaaaaatcaaagggagaagctcgaatccctgtgtcgaacactacaggcagaaaggaaacaaggcccctccgccagtattccagatgccccttctagccaagaagtgtcagcgacaagtcaagaatcttaacattccagttgccccttctagccaagatgtgtcagcaacaagtcaagaatcttggcagttgtgcttgtcaatataccgttggtgccagctacagcttgcggagatttctgaagcctgacattcagctgtcaacctaccgtccgtctcaggccttttgatattgtggctagagcctagtggtgcattcctactcggtgttgttaccaagcatataagctctcggctgattccatctcttgtttttgtttgagacaaagcctgctgcattggagataattagatttttgccaatc

SEQ ID NO: 4637 - DNA, 1773 bp, Zea mays
cacaacactcattttctccattcccacgtaaaagatagaaaggcgagcatcgcagtgcacacgcgcaatggaaggctcgccggtggcgcgcctcccggaggctaattctctccccgacggcttcgtccccgacagcgagagctcagacacggacgcggctcctccctcctccgcgcccatagttgacgatgcaatcgactccgatagtcccgacgccaccaaccccggtggtgaggaaaccctaagtgatccctcccttcccgcgtccaccgccgaagatgcctcctcagccgccgctgctgaagcattggacacactttgtctggacgttgttgcggatccggagcgcgctctaggggagcacggacccaccactgctgcaagaggtgaaggatccttgaaggaaaatcgtgcatcagagcaagtgggcgctccaagtgatcaaaaggtggtcaaggggagcggtgagcaaaaacgcaaggtcatcaagcatagcaagcttgagaaggacaaagagttatttcaactagcccagcaataccacaaagtggttgcagaaagggatcaagccattgcagtcaaagatagactagaatctctttgtagggaatttcagcgtcaaaacaaaatgctaaaggaagagtgccaaagggtatcgacagagggacagaacatgcgtacggaattgtctgaaaaatttgatcatgccataaagggtgtcagtgccaaacttgaggagcagagagttgagcgcatttctcagctagaagagaacaatacgttgagaagtaaactgaaagaccttgctgatcaatataacattactcagcagaaatatgctcaccaattgaaagagaaaatgctggaacttgaacttgctgatctgagacttcaacaacatcaagagaaggctgctcaggaacatacacaaatgcagttgtatgctgaacaagtttctcagcttatgactactgagaagaacctgcggttgcaactagcttctgacggggaaagatttcagcactttcaggatgccttgtcaaaaagcaatgaagtctttgaaacttacaagcaggagatggaaaagatgatttcagtgataaagaatcttaagaaggagaacgaatttctgaagggaaaatgtgagaactcagatattgctattgtgaagctcattgaagagcgtgagctaacaaagaagcaaatagagaaattgaaaaatcaaagggagaagctcgaatccctgtgtcgaacactacaggcagaaaggaaacaaggcccctccgccagtattccagatgccccttctagccaagaagtgtcagcgacaagtcaagaatcttaacattccagttgccccttctagccaagatgtgtcagcaacaagtcaagaatcttggcagttgtgcttgtcaatataccgttggtgccagctacagcttgcggagatttctgaagcctgacattcagctgtcaacctaccgtccgtctcaggccttttgatattgtggctagagcctagtggtgcattcctactcggtgttgttaccaagcatataagctctcggctgattccatctcttgtttttgtttgagacaaagcctgctgcattggagataattagatttttgccaatcataatattgtcttcttgttataattaccactgtgtctatgaattgtgggtctagctgggtctatgaaatgtgagtctgatgacaattttacaaacttgtttcttgctgatggtaaatatcagaatctctcgctgc

SEQ ID NO: 4638 - DNA, 1764 bp, Zea mays
attcccacgtaaaagatagaaaggcgagcatcgcagtgcacacgcgcaatggaaggctcgccggtggcgcgcctcccggaggctaattctctccccgacggcttcgtccccgacagcgagagctcagacacggacgcggctcctccctcctccgcgcccatagttgacgatgcaatcgactccgatagtcccgacgccaccaaccccggtggtgaggaaaccctaagtgatccctcccttcccgcgtccaccgccgaagatgcctcctcagccgccgctgctgaagcattggacacactttgtctggacgttgttgcggatccggagcgcgctctaggggagcacggacccaccactgctgcaagaggtgaaggatccttgaaggaaaatcgtgcatcagagcaagtgggcgctccaagtgatcaaaaggggagcggtgagccaaaacgcaaggtcatcaagcatagcaagcttgagaaggacaaagagttatttcaactagcccagcaataccacaaagtggttgcagaaagggatcaagccattgcagtcaaagatagactagaatctctttgtagggaatttcagcgtcaaaacaaaatgctaaaggaagagtgccaaagggtatcgacagagggacagaacatgcgtacggaattgtctgaaaaatttgatcatgccataaagggtgtcagtgccaaacttgaggagcagagagttgagcgcatttctcagctagaagagaacaatacgttgagaagtaaactgaaagaccttgctgatcaatataacattactcagcagaaatatgctcaccaattgaaagagaaaatgctggaacttgaacttgctgatctgagacttcaacaacatcaagagaaggctgctcaggaacatacacaaatgcagttgtatgctgaacaagtttctcagcttatgactactgagaagaacctgcggttgcaactagcttctgacggggaaagatttcagcactttcaggatgccttgtcaaaaagcaatgaagtctttgaaacttacaagcaggagatggaaaagatgatttcagtgataaagaatcttaagaaggagaacgaatttctgaagggaaaatgtgagaactcagatattgctattgtgaagctcattgaagagcgtgagctaacaaagaagcaaatagagaaattgaaaaatcaaagggagaagctcgaatccctgtgtcgamcactacaggcagaaaggaaacaaggcccctcccgccagtattccagatgccccttctagccaagaagtgtcagcgacaagtcaagaatcttaacattccagttgccccttctagccaagatgtgtcagcaacaagtcaagaatcttggcagttgtgcttgtcaatataccgttggtgccagctacagcttgcggagatttctgaagcctgacattcagctgtcaacctaccgtccgtcctcaggccttttgatattgtggctagagcctagtggtgcattcctactcggtgttgttaccaagcatataagctctcggctgattccatctcttgtttttgtttgagacaaagcctgctgcattggagataattagatttttgccaatcataatattgtcttcttgttataattaccactgtgtctatgaattgtgggtctagctgggtctatgaaatgtgagtctgatgacaattttacaaacttgtttcttgctgatggtaaatatcagaatctctcgctgctaaaaaaaaaaaaaaaa

SEQ ID NO: 4639 - DNA, 1396 bp, Sorghum bicolor
cacgtacacgggcgcgggcgcggagaccgaccaccacctcctccgggctccggttgcctccggcctcgccttccctccatcctcctccccgtctccagccccccggacgggcaacccccccgtggcgcgacagttcgtcgccggttcccatggcggcagcggaggtgtactcgccgaccgctgcggcggcggcgcagcagcagcagcgggggaaggcggcgtcgcaggcgtggcgagcggtggtggggtggatcggcttcctcctccaggtcctgctccagatcctccgaggcacgccctcctgcgcccagctcctgtccttcgtcggcttccgctaccctctcctttccgggcccgcggcttcggagccgtcgccggaggtggccttcatgccgctccactccgagatcccagctgacgcggacgcggcgcctgccccgatacctgcgcctgagcccctgggccgcctcacggtagtgcttgacttggatgagactttagtttctgcatatgaatcatctagtcttcctgctattgtgcgcacacaagcagttgaagcaggattacattgttttgatatggaatgtatatcgtctgataaggatgttgaaggaaaacagaaggtgaatcatgtgactgtttttgagcgccctggtttgcatgagttcttgctgaaaactagtgaatttgcagatcttattctttttacagcaggtttagaaggttatgctagacctttagtcgaccgaatagatgttcacaatagattcagacttcgtctctatcgcccatcaactgttaccacggaatacagagaacatgtgaaagatctttcttgcgtgtcaaaagatttcggcaggattgtcattgtcgacaacaatccgttcagtttcattcttcagcctttgaatggaataccttgtgttccattttcagctggacaacattctgatgaccagctcatgacggttatatttccactcctgaagcatctttccctccagaaagatgtcagacctgtattgcatgaaaggtttcatatgccagaatggttccaaaagcatgggatccccccaactaatcaggctgtgtaagttttgctgccgtacaatggaattgttttgatgaaggctgaagtgcctattgtgctataagccccttaagggagagcacttgtacattattatcaatattcatttagggttcctgataaaaccaaatcactgcctatatggagttgtcacatccgaagataagaaaattgtaatctagcatgacgtcagatttgtatctgtgtagtggagcattttatatcaattaattgttgtatatcagcttctgttgtaaaatttgattgttgacagttaagatagtctaatgaatagttcatggctca

SEQ ID NO: 4640 - DNA, 1482 bp, Zea mays
aaaaacaccacgtacacgggcgcggcgcggagaccgaccaccacctcttcctccggttgcctccgccctcgggcctcgccttcgctccatcgtccccgtctccatcctccaggaccggcaaccccacgtagcgcgacagctcgtcgccgtagtccatggcggctacggaggtgtactcgccgaccacggcggcggcagcgcagcagcagcgggggaaggcggcatcgcaggcgtggcgagcggtggtagggtggatcggcttcttcctccaagtcctgcttcagatcctccggggcacgccctcctgcgcacagctcctctccttcgttggtttccgctatccgctcctctccggacctgcggcctcggagccgttgccggaggtggccttcatgccgctccactccgagatccctgctgacgcggcgcctgccccgaaacctgcgtctgagcccctgggccgcctcacggtagtgcttgacttggatgagactttagtttctgcatatgaatcatctagtcttcctgccattgtgcgcacacaagctgttgaagcaggattacattgctttgatatggaatgtatatcgtctgataaggatgttgaaggcaaacaaaaggtgaatcatgtgactgtttttgagcgccctggtttgcatgagttcttgcggaaaactagtgaatttgcagatcttatcctttttacagcaggtttagaaggttatgctagacctttagttgaccgaatagatgttcacaatagattcagaattcgtctctatcgcccatcaactgttaccacggaatatagagaacatgtgaaagatcttactcgcgtgtcaaaagattttggcaggattgtcattgtcgacaacaatccgttcagtttcattcttcagcctttgaatggaataccttgtgttccattttcagctggacaacattctgatgatcagctcatgacggttatatttccactcctgaagcatctttccctccagaaagacgtcagacccgtattgcgtgaaagatttcatatgccagaatggttccaaaaccatgggatcccccaaattagtcaggctgtgtaagttttgctgccgcacaatggaattgttttgatgaaggctggagtgcctactatgctataagccccttaaggtcatgttcgtttgatcccaaaaccatagggattgagggggattggaagggattggagaggattttgacttataggggatttaatccccctcagtccctatggattagtacaaaacgaacagggcttaagggagagcacttgtacattattatcaatattcacttagggttcttgataaaaccgagtcgctgttcatatggagttgtcacacccgaagataagaagattgtaatctagcatgacctcagatttaaatctgtgtagtggagcattttatatcaattaattgttgtatatcagcctcaaaaaaaaaaaaaaaa

SEQ ID NO: 4641 - DNA, 1415 bp, Zea mays
ccacgggcgcgggcgcggagaccgaccaccacggcaccacctccacctcctccggttgccttcggcctcgcctcccctccgtcctccccgtctccagcctccgggaccggaagctccacgtggcgcggcagctcgtacccggcgtctatggcggcggcagaagtgtactcgccgaccgcggcggcggcggcgcagcagcagcgggagaaggcggcgtcgcaggcgtggcggacggtggtagggtggatcggcttccttgttcaggttctgctccagatccttcgaggcacgccgtcctgcgcccagctcttatccttcgtcggcgtccgctacccgctcctctccgggcccacagcctcgaacccgtcgccggaggtggccttcatgccgctccgctccgagatcccagctgacgcggcacctgccccgacacctgcgcctgagcccctgggccgcctcaaggtagtgcttgacttggatgagactttagtttctgcatatgaatcatctagtcttcctactattgtacgtacacaagctgttgaagcaggattacattgctttgatatggaatgcatatcatctgataaggatgctgaaggaaaacagaaggtgaatcatgtgactgttttcgagcgtcctggtttgcatgagttcttgcagaaaactagtgaatttgcagaccttatcctttttacagcaggtttagaaggttatgctagacctttagttgatcgaatagatgttcacaatagattcagacttcgtctctatcgcccatcaactgttaccacggaatacagagaacatgtgaaagatctttcttgcgtgtcaaaagatttcggcaggattgtcattgtcgacaacaatccgttcagtttcattcttcagcctttgaatggaataccttgtgttccattttcagctggacaacattctgatgaccagctcatgatggttatatttccactcctgaagcatctttctctccagaaagatgtcagacctgtattgcatgaaaggtttcatatgccagaatggttccaaaagcatgggatcccccaaactaatcagtctgttttaactggcaggatcatcgacgagcggaggaggaggttgaagtctgatgtggttgagatgttgacatgcattaaaaattgggaggatgctgaagcaaggatgcaacacatggtggatgacaaagagcttgaagaaacatttgaaaatgtttatcttgattagtctctttgtgaccatttgtgcaatgggactgtaatattatgcacctgaactttgtttattgtaaggacagtgaactttttaatgagttgggttgtactcttttttcctgtctaaggtttctcacaagggtgagttttacctagacaggtttttaacgaggcagccattgcact

SEQ ID NO: 4642 - DNA, 1394 bp, Zea mays
accacgggcgcgggcgcggagaccgaccaccacggcaccacctccacctcctccggttgccttcggcctcgcctcccctccgtcctccccgtctccagcctccgggaccggaagctccacgtggcgcggcagctcgtacccggcgtctatggcggcggcagaagtgtactcgccgaccgcggcggcggcggcgcagcagcagcgggagaaggcggcgtcgcaggcgtggcggacggtggtagggtggatcggcttccttgttcaggttctgctccagatccttcgaggcacgccgtcctgcgcccagctcttatccttcgtcggcgtccgctacccgctcctctccgggcccacagcctcgaacccgtcgccggaggtggccttcatgccgctccgctccgagatcccagctgacgcggcacctgccccgacacctgcgcctgagcccctgggccgcctcaaggtagtgcttgacttggatgagactttagtttctgcatatgaatcatctagtcttcctactattgtacgtacacaagctgttgaagcaggattacattgctttgatatggaatgcatatcatctgataaggatgctgaaggaaaacagaaggtgaatcatgtgactgttttcgagcgtcctggtttgcatgagttcttgcagaaaactagtgaatttgcagaccttatcctttttacagcaggtttagaaggttatgctagacctttagttgatcgaatagatgttcacaatagattcagacttcgtctctatcgcccatcaactgttaccacggaatacagagaacatgtgaaagatctttcttgcgtgtcaaaagatttcggcaggattgtcattgtcgacaacaatccgttcagtttcattcttcagcctttgaatggaataccttgtgttccattttcagctggacaacattctgatgaccagctcatgatggttatatttccactcctgaagcatctttctctccagaaagatgtcagacctgtattgcatgaaaggtttcatatgccagaatggttccaaaagcatgggatcccccaaactaatcagtctgtgtaagttttgctgcccttgttttgatgaaggctgtgcctattatgctataagccccttaagggagagcacttgtatattattatcaatattcatttagggttcttgataaaaccgagtcactgtttatatggagttgtcacatccaaagatacggaaattgtaatctagcataatgtcagatttgtatctgtgtagtggagcattttatatcaattagtaactgttgtatatcaccatctgctgtaaaactcgattgttgacagttaagatagtctaatgaatagttcgtggcccaccaaaaaaaaaaaaaaaa

SEQ ID NO: 4643 - DNA, 1330 bp, Oryza sativa Japonica Group
gtcctcctccccccctcctccctcctccggttgcctctccggcctcgccaccgccatcgccttcgcctccccgcctcccaaccgccccacgttgcggggagacagctcgccgcgggcggcgatcatggcggcggcggaggtgtactcgccgacggcggcggcggcggcgcagcagcagcagcgggggaaggtggcggcgcaggcgtggcaggcggtggtggggtggatcgggttcctcctccaggtcctgctccagatcctccggggcaccccatcctgcgcccagctcctctccttcgtcgggttccgctacccgctcctctccgggccggccgactccgagcagtcgccgtcggtggccttcatgccgctccgctccgagatcccggccgacacggcccctgcgccgacgcccccgccggaatccctgcagcgcctcacggttgtgcttgatttggatgaaactttagtttctgcatatgaatcatccagtcttccagctattgtacgcacccaagctgttgaagctggattacattgctttgacatggagtgcatatccactgagaaggatgttgaagggagaaacaaagtgaatcatgtcaccgtttttgaacgtcctggtttgcacgagttcttgcagaaaactagtgaatttgcagatcttattctctttacagcaggtttggaaggttatgcaagacctttagttgacagaatagatgtccataatagattcaaactccgtctatatcgtccatcaactgttactacggaatacagagaacatgtcaaagatctttcttgcgtgtcaaaagatttctgcagagttgtcattgttgacaacaacccattcagtttcatattgcaacctttgaatggaataccctgtgttccattttcagctggacaacataatgataatcagctcatggaagttatatttccacttctgaagcatctctctatccagagagatgttagaccagcactatacgaaagatttcatatgcctgaatggttccaaaaacatggcatcccccaaactgatcaggcagtgtaaattttgcagccgctacatgaaattgttttgatgaaggctgaaacgcctgccacgccataagtccgttctcaggggatagcacctgtacattattatttatatattcgtttaggtttcctggatcctgataaaaatcaagtcaaggttcgtacagaattgccatgtctgaagacaaaaggaattgtaatctagcagaatgttagattggtatttgtgtagtggggcatttaaacaccagttgtatatcaccttctgttgtaaaatttc

SEQ ID NO: 4644 - DNA, 1376 bp, Hordeum vulgare subsp. vulgare
ggaccaccacctcccacccctccctccggtcgcctccggcctcgcctcgccccgcccccctccccccgccccgccgcgacagcccctccctggcgtccatggcggccgcggaggtgtactcgccgaccgcggcggcggcggcgcagcaccagcagcgcgggaaggcggcgacgcaggcgtggcaggcggtcgtgggctggatcggcttcctcctccaggtcctgctccagatcctccgcggcacgccctcctgcgcccagctcctctccttcgtcggcttccgctacccgctcctctccgccacggccggccccgaccagccgtcgccggaggtggccttcatgccgctccgctccgagatcccggccgacgccgcccccgtcccggcacccccgcctgagcccctcgagcgcctcacggtagtgcttgacttggacgagactttagtttctgcatacgaatcatctggtcttcctcctattgtacgcacccaagctgttgaagctggattacattgctttgacatggagtgcatatcaactgacaaggatgttgaaggaaaacaaaaggtgaatcatgttactgtttttgaacgtcctggtctgcatgagttcttgcagaaaactagtgaattcgcagatcttatcctctttacagcgggtttggaaggttatgcaagacctttagtggacataatagatgctcacaataggttcaaactccgtctctatcgtccgtcaactgtcactacggagtaccgagagcatgtgaaagatctttcttgcctgtcaaaacaattcagcagaatcgtcatcgtcgacaacaatccgttcagcttcatactgcagcccttgaatggaataccttgtgttcctttttcagctggacaacactcagatgatcaactgatggaggttatcttcccgctcctgaagcatctctctgtgcagagagatgtgaggccagccttgtacgaaaggtttcatatgccagaatggttccaaaagcatgggatccctcaaactgatcaggccacctaagaactgtttaggtggagaagaatcaagtgcctgccacgccatatgtcgcctattagggggagagcacttgtacattattatttatattcatttttaggttctcttccctgataagatcatgtcattgttcatacgggattgccatgtctggaggtaaaaggaaatgtaatctagcagaatgtcacatttgcattggtgtcaacatcaattgttgtatatcaccttttgttgtaaatttgcttgttgatagctcatttaatctaatgcacggttcaagatctacgaccatgatgtcaagaggtactgatgcttgaaccttgacatcatggtttaggg

SEQ ID NO: 4645 - DNA, 1391 bp, Sorghum bicolor
cctcccggctaaaagtctccgcctccagagagatgtcggcggcgacggaggtggcgccagtacagcagcggagccatgcggcggcggtgtggcgggcggtggcggggtggctcggcctgctcttccagatcctgctccggatcatccgcagcacgccctcctcctgggcgcagctgctctccttcgtgggcctgcgccacccgctcctcccagtcgcctcgtcgcctgaggtggccttcgtgcagctcccatccgaggcccctgctgacgtgtcgcctccgccgctccggcggctcacggtggtgcttgacttggatgagactttagtttgcgcgtatgagtcttcgagccttcctgctactgtgcgcacacaggctgttgaagcaggattgcattgctttgacatggagtgtgtatcgtctgaaaaggatcctgatggaaggcagaggataaatcatgtaactgtctttgagcgtcctggcttacatgaatttttgcagcgaactagcgaatttgctgatcttgttctctttacagctggtttggaaggctatgccaaacctctagttgacaggatagatgctcacaacagattcactcaccgtctgtatcggccttcaactgttactacagaatacagagagcacgtaaaagatctttcttgtttgtccaaagatttccagagaattgtccttgttgataacaacccatacagtttcttactgcaaccattgaatggaataccatgtattacattttcagctggacaacctgttgacgatcagcttatgggaacgatatttccgctcctcgagcacctcgctctgcaaaaagatgttaggcctgcattgtatgaaacgtttcacatgccagagtggttccaaagacaaggaatcccacaaactgaacaggcagtttaggaattgcagccaccgcattggattattgaaaggctcaaaacctgctattgtacagtagcatagatacacgaagaccttgttcacatgtttgaagggagggaaagagataaaaaggaattgtaatttagcgcaatgatagatctctatttgtgacgtgaatcttgttttatggttgtatagcacttatttctgttttgtaaaacagtctgcacctcaaccatcgctttatacccactcgccctgcatccagataaagcaaacactcatgaaggtgccaaagtgagtgccagacaggcaaacactcatgaaggtgaggaaggtgccacagtgatgcaaccaaagcaagtactgcgagcgagtcgatatctgcgccagatagccgagggcttcaaaaattttgcaaagtttcacattgaattttgcgacacatgtataaaatattaaatataaataaaaataattaattgcata

SEQ ID NO: 4646 - DNA, 1214 bp, Hordeum vulgare subsp. vulgare
gggtctccgcctccgcctccattccgccccagcattatctcaatatctcatagcccccgtctccggcgaccgcgggcatggcggcggcgaccgaggtctactcgccgatgccggcggcgcagcaccgggggcaggcggcgtggcgggcggtggtagggtggctcgggctcctcctgcaggtccttctccgggccatccgcggcacgccctcctccctggccaagctcctcaggtccctcggcctccgccaccccctcctctccgccgcccccgcggtggccttcgtgcagctcccctccaaggccccctccgactccgacgacttgccgcccctgtctcccccacctggacggctcacggtagtgctggacttggatgaaacattagtctgtgcatacgagtcatcgagccttcctgccaccgtgcgcacccaggcggtcgaagcagggttgcattgctttgacatggagtgcatatcatccgacaaggatgccaaaggcagacagagggtgaatcatgtaactgtcttcgagcgtcctggtttgcacgagtttttgcagaaaactagtgaatttgccgatcttatactcttcactgctggtttggaaggatatgcaaagccattgattgacaggatagatgctcacaatagattctatcgccgtctctacagaccatcaactgttactacggaatacagagaccacgtaaaggatctctcttgtttgtccaaagatttccgtagagttgtacttgtcgataacaatccatatagtttcctactgcagccgttgaatgggataccgtgccatacgttttcagctggacagcccatggatgatcagcttatgagagtgatctttccgcttctcaagcacctttctcttcaaaacgatgttagaccagcactgcgcgacgcgtttcatatgccggagtggttccaaagtaatgggatcccacaaattgaccaggcaatgtaagttatgcagcaactctgcaactgaattggattaaaaggtgaaagctcaaaagctagctgtgcttctcgggggtattacttgtacagttctattcgtttaggtccttccatacgagcaattgttcaacatggagtaaccgtgcccgcagagaagaaagatgtaatatagctctggcagacatttttttctgtaatgaaccttaatttatcattgtatagcactttttggttgctg

SEQ ID NO: 4647 - DNA, 1768 bp, Sorghum bicolor
aaccaaccagatgggttgctaatcgcggttcgcaacgagccgggtgcctctgcctgcctgcctgcctgcctgccgctccaaagtccaaccagcgcgtcgtcgtcccttccgtcacctcaagagctcactttctcgccctctataaacctgcctcccgccgcgccgcccttctccatccccagatcaaaacccccccggcccggcgcccttcgtccccgcctcttgatcggccatggcgcccgctgctgctgcgtcccgggtggctgtctcgtcgccggtcttcggctccgatggcggcgccaggagctccgggatcaagggtaacaacaatgttagcttcggcaacaaatcctgggtcggcggcacattggcctgggagagcagctcggtgcggcccaggcacgtgaacaaggtgctctgcatgtcggtccagcaggcgagcaagagtaaagtctctgttgcgccactcgatcttgagagcgccaaggagccacctctcaacacatacaagcccaaggagcccttcacggccaccattgtctcggtggagaggctagtcggccccaaagctccaggggagacttgccacatcgtcattgaccatggtggcaatgtgccgtactgggagggccagagttatggtgtcattcctcctggagaaaaccccaaaaagcctggagccccacaaaatgtcaggctttattcaattgcatcaactaggtatggagattactttgatggaagaaccggaagcttgtgtgtccgccgtgcagtttattatgatcctgaaactggcaaggaggagccctcaaagaatggtgtctgcagtaatttcctgtgcaactcaaaacctggggacaagattcaattaacaggtccctctggcaaaataatgcttctaccggaggaggatccaaacgcaacccatatcatgattgctactggcaccggtgttgcccccttccgtgggtacctgcgtcgcatgttcatggaagatgttccaaactacagatttggtggcttggcctggctcttccttggtgttgccaattcagacagccttctgtatgacgaagaattcaccagctatcttaagcagtatccagacaatttcaggtacgacaaagccctcagtagggagcagaagaacaggagtggtggcaaaatgtacgtccaggacaagatcgaggagtacagcgatgagattttcaagcttctggatggcggagcgcacatctacttctgcggtttgaagggaatgatgcctggaattcaggacacccttaagaaggtggcagagcagagaggcgagagctgggaccagaagctctcccagctcaagaagaacaagcaatggcacgttgaggtctactagggctcgaattggttgtaattgcgacccttaatgctgcgggtcatcgtcaggaggaaacaaacacatgattgaaattgaatcgtcgaatgattcttggggcggtgtaaaatcacaaaaagttctcttggcgagaatcagaaaatcgcctttgtaattcataaagcttccgcgtcacggttatccgtggaacgggagcatgtaactttcagccgtttacatttgcagtgcagtgcttttgacagtatttccaattagaggtctctgtccagttggtacgcatacgaatcctgatgacttgaaatgtttaacacatggctcctggtgtagcccagcgtctctctgtatatgatctaaattcacctgcagtctgtcactttcattgaaacgcttgcg

SEQ ID NO: 4648 - DNA, 1564 bp, Zea mays
atcactgctggccctgactgaggccctcggccctcctccagtcccctccgcggctccgcctctattaaacccttgtcccttcggcgagactcctctcctccttcagatcaaccctcccctccccggcccgacgcccctcgccccccctcctgaccggccatggcgaccgctgctgctgcgtcccgggtggctgtctcggcgccggtcttcggttcggacggcggcgccaggagctccgggatcaagggcaacaacaatgttagcttcggcagcaaatcatgggtcggcggcacattggcctgggagagcagctgctcggtgcggcccaggcacgccagcaaggtgctctgcatgtccgtccagcaggcgagcaggagtaaggtctccgtcgcgccgctccatctcgagagcgccaaggagccacctctcaacacgtacaagcccaaggagcccttcacggccaccattgtctcggtggagagtctggtcggccccaaagctccgggggagacttgccacatcgttatcgaccatggtggcaatgtgccgtactgggagggccagagctacggcgtcattcctcctggagaaaatcctaaaaagcctggagccccacaaaatgtccggctttattcaattgcatcgactaggtatggagataacttcgatgggcgaaccggaagcttgtgtgtccgccgtgcagtttattatgatcctgagactggcaaggaggacccctcaaagaatggtgtctgcagtaatttcctgtgcaactcaaaacctggggacaagattcaattaacaggtccctccggcaaaataatgcttctgcctgaggaggatccaaacgcaacccatatcatgattgccacgggcaccggtgttgcccccttccgtgggtacctgcgccgcatgttcatggaagatgtcccgaactacagatttggtggcttggcctggctcttcctcggcgttgccaattcagacagccttctgtatgacgaggaattcaccagctatcttaagcagtatccagacaatttcaggtacgacaaagccctcagcagggagcagaagaacaggagcggcggcaagatgtacgtccaggacaagatcgaggagtacagcgacgagatcttcaagctcctggacggcggcgcgcacatctacttctgcggtttgaaggggatgatgcctggaatccaggacacccttaagaaggtggcggagcggagaggcgagagttgggaccagaagctggcccagctcaagaagaacaagcaatggcacgtcgaggtctactaggactcggattgctgtggttgcgacccttgatgctgccggggcagcgtctggagacaaacacatgattgaaattgaatcgatggatggttctcggggcggtgtaaagtcacaaaagttctctttgtgataatcggaaaaaaaaatcgccttttgtaattcataaaagcttccgcgccacggttatccgtggaacggaccgtgtaactttcagccgtttacatttgcagtgcagttgcttttggcaaaaaaaaaaaaaaaa

SEQ ID NO: 4649 - DNA, 1460 bp, Oryza sativa Japonica Group
gattctgtctataaaccccgcctcctcccctcccatctcatctcaactcatctcatctcccttctccagatcaaaagacccttgctttccctcaggatcggccatggcgaccgccgttgcgtcccaggttgctgtctctgctccggctggctcggatcgcggcttgaggagttctgggatccagggtagcaacaatattagctttagcaacaaatcatgggttggcaccacattggcgtgggagagcaaggccacgcgaccgaggcatgcgaacaaggtgctctgcatgtcagttcagcaagcgagcgaaagcaaggttgctgtcaagcctcttgatttggagagtgctaacgagccgccgctcaacacatacaaaccaaaggagccttacaccgccacaattgtctcggttgagaggatcgtaggccccaaggctccaggagagacatgccacattgttattgatcatggtggcaatgtgccttactgggaggggcaaagctatggcattattcctccaggggagaacccgaagaagcctggtgcaccacataatgtccgtctttattcaattgcatctacaaggtatggagattcattcgatggaaggaccactagtttatgtgtgcgccgtgccgtttattatgatcctgaaactggcaaggaggacccctcaaaaaatggtgtctgcagtaacttcctatgtaattcaaaaccaggggacaaggttaaagtgacaggtccgtcaggcaaaataatgctcctgcctgaggaagatccaaatgcaactcacatcatgatagctactggcactggtgttgctccattccgtggctacctacgccgtatgttcatggaagatgtcccaaagtacagatttggtggcttggcctggctcttccttggtgtggctaacactgacagccttctctatgatgaagagttcacaagctaccttaagcagtatccagacaatttcaggtatgacaaagcgctaagcagggagcagaaaaacaagaacgctggcaagatgtatgtccaggacaagatcgaggagtacagcgacgagatcttcaagctcttggatggcggcgcgcacatctacttctgtggtttgaaggggatgatgcctgggattcaagacaccctcaagaaagtggcggagcagagaggggagagctgggagcagaagctatcccagctcaagaagaacaagcaatggcacgttgaggtctactaggatctaagtgtccaaggattatgattgttgcgcagtgaaaaagagaaaacaaaacgcatgatctgatgattcttgtagggtggtgtaaaatcatcattttttttctgaatatgaatcataaaatcacccatgtaattcataagcttctgcatcacatgatgaacgaaaggaagcatgtaacttttgcctgtcactattgcagctggtacctttgctatct

SEQ ID NO: 4650 - DNA, 3879 bp, Hordeum vulgare subsp. vulgare
gccagatcaaaaccccccctccccccctccccttcctcgaaccatccgtaggtcggccatggccaccgccgctgcgtcccaggtggctttctccgcgcccgtccccggctcggaccgcgccgtcaggagctccggaatcaagggcaccaacagtctcagcttcggcaacaagtcatggatcggcaccgcattggcgtgcgacggcaaggccgtgctgcaacagaggcatgtctgcagggccgtccagcagtcgagcaagagcaaggtctccgtcgcgcccctcgacctggagagcgccaaggagccgccgctcaacacctacaagcccaagggcccttacacggccaccatcgtctcggttgagcgggcggtagggccaaacgctccgggggagacatgccacgtcgtcatcgaccatggtggtaatgtgccgtactgggaggggcagagctatgggatcattcctccgggagagaacccgaagaagcctggaaacccacagaatgtccgtctgtattcaattgcatctactaggtatggggattcgtttgatggaaagacggctagtttatgtgttcgccgtgcagtttattatgatcctgaaactggcaaggaggacccctcgaagaatggtgtctgcagtaatttcttatgcaactcaaagcctggggacaagattcagctgacaggaccctctggcaaaataatgcttctacctgagagcgatccaaatgcaacccatatcatgattgccactggcactggtgttgctccctaccgcgggtacctgcgccgcatgttcatggaagatgtcccaaattacagatttggtggcctggcttggctcttccttggtgtggctaattcggacagccttctctatgacgaagagttcacaagctaccttaagcagtatccagacaatttcaggtttgacaaagcactaagtagggagcagaagaacaagagtggtggcaagatgtacgttcaggacaagattgaagagtacagcgacgagattttcaagcttttggatggaggcgcacacatctacttctgtggtttgaaaggaatgatgccagggattcaggatacgctcaagaaggtggcagagcagagaggggagagctgggatcagaaactatcgcagctcaagaagaacaagcaatggcacgttgaggtttactaggatggcaattgttcggctatctataattcgctctgctatgagacaatgtcaggaaaaggcagaacacacacatgggatgattcttgtgatggtgtaaaattaccaaacattatttttgagaggatcataagactttccatgtaattcataagcttctgcatctcatgatgcgtgaaatgaagcatgtaacctttgttcttataattccttggggtgttttgtctgaagccgaatttaagcacctgccctggctgttcatggatgaagtgcaatactatattgtagattgttattcattcaaatctttagagggcatatacatgttctgtgcgtacttcatgatattttgtatggaaaaaaaaaaaaaaaatacgcatgggccataagggccaaaggatcctttggcccttatggcccatgtgacttttttttttttttttgtcagtaagaatactctttatacaagattgtcacagatgataactcaaccatggtacagagctccaaccaaacctaatgctatctcgagtaactgaaacagctacacaaggcttctacaataccatcagcaaggatacatgaacatagatactagatttcttgcatctttctactacggcacaggacccaagtccaacaatgaacagtttccgcgaattagctgtgttcaccacaaatgattatagaggtttgcctgtccaaaggactctgtacagatggcgcatcgctgctcaaactcaggcagtatgatcaaaagctgattaatcacttccaaaatcttcataactaacagcctcagatatggaatctagccgtatatttcctatttctgtatgtcctccagcagtagactctgagaagttgttcgtctcagaagggatgaaaggggacctgccataattttctaatatttctgtactatgactgaaatcctctgttaaatctgagaaactgaaattgcgaggaatctggctcaagaaaccatatgatgatgtatccatgtcaagaattggatcaccaagtggttgcccattcagttcagagctactaaaggacccaccagaggcatccccaattgattggcaaggctctaggtaagtgttctcgttgcagaatgcaaattcaggattactcgaatagctagactccgcctttattgttgtaccattatctccattaaactgtccaccagtcgaattatgtgctgacagtagactaactgaagcatccataccactaggaagaccatggacaactttaccaccatagataaactgctcagtagcaggagcaccatttattacaccactagaacttccattgtgtagaaagctatctggaattgcagtgctagtagtgtcttgtaaaaaacatgtattttggttcaatgtgctcgagtcagagccattaggagcagtgggggtaacagaaagtgctccagaaggatctttattcataagacgaccctgatgcgcaaggagcttgttgaataccaatatttgattcttaagcatcaacctcacataatatgccttaaaaaactcagggttctcttcttcaagtttctgccagacgagttcagtaaagctgggttctattttcgcctggaaagatagagttccaaccacttctttctggttcatgtaaagctgaagacaacgttcgatgagattctggacgagctgtatgtcctcgcgagacaccttgcgcccttctccttcctctcccccggacatgccgcctcctgccctagctagcctagctccgctccgctctgctccacgcctttcctcgggcctgccggcgggaagggaggcgcggacgacgtcgaggccgggcggggcgaggggctgcgcgcgcgcgcgcgcgtgtatgatcggatcacggtggtgagggcgacggcaggagcgagaggcggggtcgggggcgttttgtgatggccgatttggccctcgagggccaaatcggccatcacgcattggcggaggcatcatgggttcgaatggccgtgatccgatcattatcttcggagaagtcaaatttacccaacagacggctgctagcccagttgttgtcaatgtcaatgttaccttcttcccgccaaacgacccaatcatcaaccgtgagcacggtttccacgttcactcgtttggcattcaatcagtgagctccaatccagctgagacttgcgaaactgctggcccacactggaacccaacgaacgctcgtcacggaggtctcgagaacttaaagtcgcacgagggcgatcttggcaacgttgtcttctcgccagtcaacggtcaaatcctctctcaaatcatctcgcaaaagttgcaactctccggcccggactcgatcattggccgatcggttgtcttgcacgagaaggtcgacgatcaaggtttgggcggcactccgatgagcgacaagaccggcaactccggaatcaaaatcgcttgcggtaccattggcattcgaccataaatcaacgcgcgcttttatttacactatattctttttagtcattttctatacaatgcaatcttcaaattgaatttttttataaatttacaaaatgtaaattattatttataactaatttctaaatcgggattctttataatttattgtattttttaccacgaaataataattataaaaatgattgaataaaaataaaaatttatttc

SEQ ID NO: 4651 - DNA, 1419 bp, Oryza sativa Japonica Group
gtgccaaacatatccgtccctttccctctcctcagcttcgcgtcaattccagagatcaaaaccctagccaacccctcctcctcctcctcttcctcgcgatccaccggcgatggcctccgccctcggggctcaggcgtctgtcgcggcgcccatcggtgcgggcggctacgggaggagttcctcgagcaagggtagcaatactgttaacttctgcaacaaatcatggattggaaccacattagcatgggaaagcaaggccctaaaatcaaggcatatgaacaagatcttttccatgtccgttcaacaagcaagcaaaagcaaagttgctgtaaaacctctggaattggataatgcgaaggagccaccccttaacttatacaaaccaaaggagccttacacagccacaattgtctcagtcgaaaggcttgtaggccctaaagctcctggtgaaacatgccatattgttattgatcatggtggcaatgttccatactgggaaggacaaagttatggtgtcattcctccaggagagaacccgaagaaacctggttccccaaatactgtccggctctattctattgcatctactaggtacggtgattcttttgatggaaagactgccagtttgtgtgttcgtcgtgctgtttattatgatcctgaaactggaaaagaagaccccacaaagaaaggtatctgcagtaatttcctatgcgactctaaaccaggcgacaaagttcagataacaggcccctcaggcaaaatcatgcttctacctgaggatgatccaaatgcaacccatatcatgattgctactggcactggtgttgctccctaccgtggctatctacgtcgtatgttcatggaggatgtcccaagtttcaagtttggtggtctggcttggctatttctaggtgttgctaacactgatagccttctgtatgatgaagagttcacaaactaccttcagcagtatccagacaatttcaggtatgataaagcactaagtagggaacagaagaataagaatggtggaaagatgtatgtgcaggacaagattgaagagtacagcgatgaaatttttaaacttttggatggcggtgcacatatctacttttgtggtttgaagggtatgatgccagggatccaggacacactcaagagagtagctgagcaaagaggtgagagttgggagcagaagctgtcgcagctcaaaaagaacaaacaatggcacgtggaggtttactaagttactaaaaagcacgggctgtgattttgtgattgttttgcagcgagttgaaacataaaacagtaaaaagcgatgattctcgttgcattgtaaaattgtcaatcttattcataagcttctgcttgacatggtgaataaaatgaagcatatgctaattttgacttagtattgtg

SEQ ID NO: 4652 - DNA, 1432 bp, Zea mays
gacaaagcagcccgtccctctcctactcctcccccaaagttccgttccgttccgttcagttccctcccgcaggtcaaaaccctcaacctcccacgcggctcgctcgctgggtgggtcggccatggctccccccgcgctcggatctcaggtggccgccgcagcctcggtgcccgtcggctcggactctctcgccaagggcgcggcgctcaagggtaacagcactctaaactttcggaccaaaccatgcatcgggatggcattagcgtggaaaaacaggacccagcaaccacggcgtctgaacaaggtactctgcatgtctgttcaacaagcaagcagaagcaaggttgctgtcgtgcccatcgagttggagaaggcaaaggagccaccgctccacctgtacaaaccaaaggagccttacacggccacgatcgtctctgtcgagaggcttgtaggacccagagctcctggcgaaacatgccacgttgtcattgatcatggcggcaatgttccgtactgggaaggacagagttacggcgtcattcctcctggagagaatccaaaaaaacctggatctcccaatactgttaggctctattcaattgcttctactaggtatggtgattcttttgatggaaagacagcaagcttatgtgttcgccgtgctgtttattatgatcctgaaactggagaggaagacccctcaaagagaggtgtctgcagtaacttcctgtgtggctcaaaaccaggggacaaagttcagatcacaggcccctcgggcaaaataatgcttcttcctgaggatgatccaaatgccactcatatcatgattgccacggggaccggtgttgctccctaccgtggctacctacgtcgcatgttcatggaagatgtcccaactttcaaatttggtggtctggcttggctcttccttggtgttgcgaactctgacagccttctctatgacgaagagttcacaaactaccttcagcagtatccagacaatttcaggtacgacaaagcgctaagcagggagcagaagaacaagagcggcgggaagatgtacgtgcaggacaagatcgaggagtacagcgacgaaatcttcagactgctagatggcggtgcgcacatctacttctgtggtttgaaggggatgatgccggggatccaggacacgctcaagaaggtggctgagcaaagaggcgagagctgggaccagaagctgtcacagctgaaaaagaacaagcagtggcacgtcgaggtttactaggctataagatggcaaggattgtgattgtttagctactgagctgagaaactggacgtatgattgaacgactgtggctgctgcgatgtaatgtaacattgtagacttggattcataagcttctgctccaaatggtgaataaaatgaagcacgcggtttgtagctgct

SEQ ID NO: 4653 - DNA, 1461 bp, Zea mays
aagtgttctcttctctccaagcggacaaagcccgtccctctcctactcctcccccaaagttccgttcagttccctcccgcaggtcaaaaccctcaacctcccacgcggctcgctgggtgggtcggtcggccatggctccccccgcgctcggatctcaggtggccgccgcagcctcggttcccgtcggctcggactctctcgctaagggcgcggcgctcaagggtaacagcactctaaactttcggaccaaaccatgcatcggaatggcattagcatggaaaaacaggacccagcaaccacggcgtctgaacaaggtactctgcatgtctgttcaacaagcaagcaggagcaaggttgctgtcatgcccgtcgagttggagaaggcaaaggagccactgctccacctgtacaaaccaaaggagccttacacggccacgatcgtctctgtcgagaggcttgtaggacccagagctcctggcgaaacatgccacgttgtcattgatcatggcggcaatgttccgtactgggaaggacagagttacggcgtcattcctcctggagagaatccaaaaaaacctggatctcccaatactgttaggctctattcaattgcttctactaggtatggtgattcttttgatggaaagacagcaagcttatgtgttcgtcgtgctgtttattatgatcctgaaactggagaggaagacccatcaaagagaggtgtctgcagtaacttcctgtgtggctcaaaaccaggggacaaagttcagatcacaggcccctcgggcaaaataatgcttcttcccgaggatgatccaaatgcgactcatatcatgattgccacggggactggtgttgctccctaccgcggctacctacgtcgcatgttcatggaagatgtcccaactttcaaatttggtggtctggcttggctcttccttggtgttgcgaactctgacagccttctctatgatgaagagttcacaaactaccttcaacagtatccagacaatttcaggtacgacaaagcgctaagcagggagcagaagaacaagagcggcgggaagatgtacgtgcaggacaagatcgaggagtacagcgacgaaatcttcagactgctagatggcggtgcgcacatctacttctgtggtttgaaggggatgatgccggggatccaggacacgctcaagaaggtggctgagcaaagaggcgagagctgggaccagaagctgtcacagctgaaaaagaacaagcagtggcacgtcgaggtttactaggctataagatggcaaggattgtgattgtttagctactgagctgagaaactggacgtatgattgaacgactgtggctgcgatgtaatataacattgtagacttggattcataagcttctgctccaaatggtgaataaaatgaagcacgcggtctgtagctgctactaccaaaaaaaaaaaaaaaa

SEQ ID NO: 4654 - DNA, 1541 bp, Sorghum bicolor
tccaaacggtcaacaagcccgtccctctcctccccgtgacccgtcgctcgcctccggcctccccaaccccaaagttcagttccctgccgcagatcaaaaccctagcaaacccctcctcccacgcggctcggtcggccatggcttcccccgcgctcggatctcaggtggccgccgctgcctcggtgcccgtcggttcggattgttgcttcaagggcaccgcgctcaagggtaacagtaatctaaacttccggaacaagccatgcattgggatggcactagcatggaaaaacaagacccaacaatcgcgacatctgaacaaggtcttctgcatgtctgttcaacaagcaagcagaagcaaagttgctgttaaacccattgagctggagaatgcaaaggagccaccacttaacttatacaaaccaaaggaaccttacacggccacaattgtctctgttgagaggattgtaggacccaaagctcctggtgagacatgccacattgtcattgatcatggtggcaatgttccgtactgggaaggacagagttatggtgtcattcctcctggagagaatccaaaaaaacctggatctccaaatactgttaggctctattcaattgcttctacaaggtatggtgattcttttgatggaaagacaacaagcttatgtgttcgtcgtgctgtttattatgatcctgaaactggagaggaagacccctcaaagaaaggtatctgcagtaacttcctgtgtgactcaaaaccaggggacaaagttcagatcacaggcccctcaggcaaaataatgcttcttcccgaagatgatccaaaagcgactcatatcatgattgccacggggactggtgttgctccttaccgtggctacttacgtcgtatgttcatggaagatgtcccaactttcaaatttggtggtctggcttggctcttccttggtgtggctaactctgacagccttctctatgatgaagagttcacaaactaccttcagcagtatccatataatttcaggtatgacaaagcactaagcagggagcagaagaacaagaacggcggcaagatgtacgtgcaggacaagattgaggagtacagcgatgaaatcttcaagctgctagatggcggtgcgcacatctacttctgcggtttgaaggggatgatgcctgggatccaggacacgctcaagagggtggctgagcaaagaggcgagagttgggaccagaagctgtcacagctgaaaaagaacaagcagtggcacgtggaggtttactagtaggttatgaaacgccaaaggattgtgattgtttcggcgagtgaggtgagaaactggacatatgattgaacgattgttgtggtgatgtaacattgtcgactttattcataagcttctgctccaaattgtgaataaaatgaagcagacggtttttataattgttactatctatcggagagcattaccggtaccagggtaaattttttttagctcgtttcacataacttgctaagctattttcaagggtacatgtccttg

SEQ ID NO: 4655 - DNA, 1520 bp, Zea mays
atcaaccctcccctccccggcccgacgcccctcgccccccccctcctgaccagccatggcgaccgctgctgctgcgtcccgggtggctgtctcggcgccggtcttcggttcggacggcggcgccaggagctccgggatcaagggcaacaacaatgttagcttcggcagcaaatcatgggtcggcggcacattggcctgggagagcagctgctcggtgcggcccaggcgcgccagcaaggtgctctgcatgtccgtccagcaggcgagcaggagtaaggtctccgtcgcgccgctccatctcgagagcgccaaggagccacctctcaacacgtacaagcccaaggagcccttcacggccaccattgtctcggtggagagtctggtcggccccaaagctccgggggagacttgccacatcgttatcgaccatggtggcaatgtgccgtactgggagggccagagctacggcgtcattcctcctggagaaaatcctaaaaagcctggagccccacaaaatgtccggctttattcaattgcatcgactaggtatggagataactttgatgggcgaaccggaagcttgtgtgtccgccgtgcagtttattatgatcctgagactggcaaggaggacccctcaaagaatggtgtctgcagtaatttcctgtgcaactcaaaacctggggacaagattcaattaacaggtccctccggcaaaataatgcttctgcctgaggaggatccaaacgcaacccatatcatgattgccacgggcaccggtgttgcccccttccgtgggtacctgcgccgcatgttcatggaagatgtcccgaactacagatttggtggcttggcctggctcttcctcggcgttgccaattcagacagccttctgtatgacgaagaattcaccagctatcttaagcagtatccagacaatttcaggtacgacaaagccctcagcagggagcagaagaacaggagcggcggcaagatgtacgtccaggacaagatcgaggagtacagcgacgagatcttcaagctcctggacggcggcgcgcacatctacttctgcggtttgaaggggatgatgcctggaatccaggacacccttaagaaggtggcggagcggagaggcgagagctgggaccagaagctggcccagctcaagaagaacaagcaatggcacgtcgaggtctactagggctcggattgctgtggttgcgacccttgatgctgccggggcagcgtcaggagacaaacacatgattgaaattgaatcgatggatggttctcggggcggtgtaaagtcacaaaagttccctttgtgagaaaaatcgccttttgtaattcataaaagcttccgcgccacggttatccgtggaacggaccgtgtaactttcagccgtttacatttgcagtgcagttgcttttggcagtctgtctagtgtctaacaataggtctctgtccagttcgtacgcatatgaaccctgatgactttgcataattgccgttcaatgct

SEQ ID NO: 4656 - DNA, 1195 bp, Zea mays
cgttgctgtcggcgccagcaaggtgctctgcatgtccgtccagcaggcgagcaggagtaaggtctccgtcgcgccgctccatctcgagagcgccaaggagccacctctcaacacgtacaagcccaaggagcccttcacggccaccattgtctcggtggagagtctggtcggccccaaagctccgggggagacttgccacatcgttatcgaccatggtggcaatgtgccgtactgggagggccagagctacggcgtcattcctcctggagaaaatcctaaaaagcctggagccccacaaaatgtccggctttattcaattgcatcgactaggtatggagataactttgatgggcgaaccggaagcttgtgtgtccgccgtgcagtttattatgatcctgagactggcaaggaggacccctcaaagaatggtgtctgcagtaatttcctgtgcaactcaaaacctggggacaagattcaattaacaggtccctccggcaaaataatgcttctgcctgaggaggatccaaacgcaacccatatcatgattgccacgggcaccggtgttgcccccttccgtgggtacctgcgccgcatgttcatggaagatgtcccgaactacagatttggtggcttggcctggctcttcctcggcgttgccaattcagacagccttctgtatgacgaagaattcaccagctatcttaagcagtatccagacaatttcaggtacgacaaagccctcagcagggagcagaagaacaggagcggcggcaagatgtacgtccaggacaagatcgaggagtacagcgacgagatcttcaagctcctggacggcggcgcgcacatctacttctgcggtttgaaggggatgatgcctggaatccaggacacccttaagaaggtggcggagcggagaggcgagagctgggaccagaagctggcccagctcaagaagaacaagcaatggcacgtcgaggtctactagggctcggattgctgtggttgcgacccttgatgctgccggggcagcgtcaggagacaaacacatgattgaaattgaatcgatggatggttctcggggcggtgtaaagtcacaaaagttccctttgtgagaaaaatcgccttttgtaattcataaaagcttccgcgccacggttatccgtggaacggaccgtgtaactttcagccgtttaca

SEQ ID NO: 4657 - DNA, 796 bp, Sorghum bicolor; identical to SEQ ID NO: 1581

SEQ ID NO: 4658 - DNA, 802 bp, Zea mays
gattccaactctgcgagaaaagctaaaataatcggacccatctcttggaccgtgcgatcgcccccctccgccgccgcccacggatcaacgccacgccaccacgccggaagaccgggatcgtgacggccacatggacatggctacggcggccgccgcgttgccatggggaggcggttccccggcgtggatcgacgtgcctgagcggagcaagagcgcgttcatggagctgaagcggaggaaggtccaccggtatgtgatcttcaagatcgacgacagtagagaggaggtcgtcgtcgacaagatcggcgcgcccggggagagctacgacgacttcacggcgtcgctaccgaccgatgattgccggtacgccgtctacgatctggatttcgtaagcgacgacaactgccggaaaagcaagattttcttcatctcctggtctccttcagattctcgcatccgtgccaagaccatatatgccgtgtcaaggaaccaattccgtcatgagcttgacggagtgcacttcgagatccaagccaccgatcccgatgacatgaatctagaagttctcagggggcgtgctaacagaacctgattcactagcgagcaacccaaaatgcagctcggaggtcgctgatctgatgaggcatgacgtagaagtataggctgccgatcacacccgggcatgcattgtttctttttacttcttcctttccttttggagttatacttccgtgatgtttgcctaactacataggttccctctaatatgatgtggactgtggaaccaaaaaaaaaaaaaaaa

SEQ ID NO: 4659 - DNA, 997 bp, Oryza sativa Japonica Group
ggtggcggcggctcgccggcgtggatcgaggtgccggagaagagcaagagcgcgttctgggagctgaagaggaggaaggtgcaccgctacgtgattttcaagatcgacgacaggcgggaggagatcgtcgtcgagaagaccggcgcgccgggggagagctacgacgacttcacggcgtcgctgcccgccgacgactgccggtacgccgtctacgatctggatttcgtcagcgacgacaactgcaggaagagcaagatattcttcatctcatggtcagtctttcttttgcaacctgtttctcctcattctcagcttcagttttggggctttaggtttgggacttgcttgatgtctcctttcattttcagttggtgtgcctatataagtttcttgttaggataacaacaaaagcggtaactcagagctggttaaacaattatactcagtacattgtggcctatgcaatgagctggtggttgtctaattgttgttttacagatttcttattgataggataaataaatacataagaacaacatatcctttattgtaaggataaatacaaagccacatctttactcagcagtttgactaatgacatgttatccagtaagatgtgtgaacgatgaagtgacttcatagcaacagttactagtactgaaaacaaactaaatgacaaaaagaagtgatctttcatctgtcaaatgcatgcggctcatgggtttttcatggtacagaacaacttagtttttgttccaaagttctccaggttttatgtgacaaaaggactgcaaccaagttcttagaacacggccatattaccgttgctccttttcttttcaggtccccttctgtttcccgcatccgagccaagaccatatacgccgtgtcgaggaaccaatttcggcacgagcttgacggtgtgcactttgagattcaggccacggaccctgatgacatggatttggaagttctcaggggccgtgctaatagaacc

SEQ ID NO: 4660 - DNA, 761 bp, Oryza sativa Japonica Group
gtagtgtagcgtgggtgtgggtgtatggtctgaccgtccatggagattcttggattcactgttatgggtggcggcggctcgccggcgtggatcgaggtgccggagaagagcaagagcgcgttctgggagctgaagaggaggaaggtgcaccgctacgtgattttcaagatcgacgacaggcgggaggagatcgtcgtcgagaagaccggcgcgccgggggagagctacgacgacttcacggcgtcgctgcccgccgacgactgccggtacgccgtctacgatctggatttcgtcagcgacgacaactgcaggaagagcaagatattcttcatctcatggtccccttctgtttcccgcatccgagccaagaccatatacgccgtgtcgaggaaccaatttcggcacgagcttgacggtgtgcactttgagattcaggccacggaccctgatgacatggatttggaagttctcaggggccgtgctaatagaacctgatagagattgacttcgatagtttgttaattagccttcttttgcataactttaatatgtagctcgctgctgaaaatgcatctcgggtgcatgatgtataagcaagctgctgatcacaccccagcattgcagttttaccttctttttttacagagataacatctttctgatatctgtctaattatatatgttccctctaatatgatatggaaattgtgccttgttatatctaaatttgtaatatactgtatttctgctgtttgatattg

SEQ ID NO: 4661 - DNA, 1968 bp, Sorghum bicolor
caggattcaagggtattttaaagatgacgaaggcagcaactctttatgggagcaagacgcagagcgatgccctgcggccagggccattgcgtccagcaaattttatcagaaataaattccccacatacaagaatggttcaaatggtatagtgatcaagctggctgatggtccagaaatgccacctctcaaggagatcgttgcaaaggagactgcagatctacttgaccgtcgtcagcgtctctctgtccgtgaactcgcgatgaagtttgagaagggtctcaacactgccaccctgctgtcgaatgaggttaaatggagacaagtagctttgctggagcgggatatccttttgaagaatctaaagagtgtattagagtcactgagaggtcaggtgacgggcaaaactaaggatgaaatcgaggagtctatatctatggtggagatcctcgcggttcagctctccaaaagagaggctgagttgcttcagcaaaaagaagaagtcacaaaattagcaaaatcattaaagcaggcttctgaagacgcaaagagaattgttgaagaagaaagagctaatgctcatacagaaatagaaactgctaagagtgctgtccagagagttcagcaagcagttcaggagcatgagaagatgtcccaaaatactgggaaacaagacatggaagaactaaagaaagaagttagagaagcccggaggatcaaaatgttgcatcagcccagcaaggcaatggatctggaaaatgaaatacgaattttacgtaacacgtttgctgagaagtccaaggattgtgttaatcttttgaaagagttggaaatgcataaaaggttaaaagaaaatggtaccatcccttcatttgatttggagggtctccaatgcttaggatcaatgctacgtatagttggtctgagtggtacccacatggatttgtcaaatatttcaatccagtggttccggatacatccaaaagaaagcaacaaagagattatttcaggtgccacaagaccagtatatgctctagagccacatgatgttggacgctatttgcaagctgaaatcgatgttggcggtgaaattgcagtagcaaagacagctgggccagtagaccctgatgctggattggttgattatgtggagacactcgtaaggaaacctgaaactgaattcaatgttgttgtgcttcaattgaatggcgttgaccagccaaaagagtcagttcatgtactcaatgtcggaagactgcggatgaggcttactaaagggaagtcggtagttgccaaggaattctattcctcatcaatgcagttatgtggtgttagaggtggtggcgaagcagcctcgcaggcaatgttttggcgacccagaaacgacctcagcttggtgctagccttcgagagcactcgggaacgcaacacagccatcatgcttgctcggcgattcgctatagattgcaatatcatccttgctgggccaggcgacaaaactccctggtgaacgaagatggtacctgtgctctgctgatcccaccactcttaacaatctgcgattcgtgcagtgatgtacatcttgtgtgcacagcgtgtttgcaccagttcctctaatttttcagtctggcgtctgtgctgttctgctcgtcctcgtgttgtaggtttctgaaagaaggcgctgtgcgcaccgttttaaccgcctcggcgccgcctttctatctcactgtgctgtgtttttcagtcgcgagggttgtaatctgttgctaggagatgcgacagtaatgtaagcttgatgcggtacacgtctaattgtgtttgacatatgttagtgttgatgttgaagcaattgataggtaatatgtgtgggagtgagggaagaaaccttctaacccacctcggttgtgatgcgagcccaaatactggctcgcggttcttgttcaatgatacaattgcacaattagatttga

SEQ ID NO: 4662 - DNA, 4749 bp, Oryza sativa Japonica Group
atgacccgggcagtaactcttgattatgggggcaaggttcagactcgtgattatggaggcaaggctcagactgagactttacggcctgggccgttacgtcctgcaaacatcatcagggctaaatttcctacctacaaaaatggtttgaatggtatagtagtcaagctggctgatggccctgaaatgccatctctcaaggagactgtcaccaaggaaactgcggatatgcttgatcatcgtcagcgtctgtcagtccgtgagcttgcaatgaagtttgagaagggtctcaatactgccactttgctgtccaatgaggttcagactttactattcagtttaactaatacaattacacagtgttacttttgttttttcttcctcgaaaacacaggagaactgcgcttcattatattaagaagagagaaaggggctagagccctacaacacacaccacacacaacccacaccactcaacacaactcccaactcagaaaacacaatttattacttttgttatgtggtacctactcacgaggaatgaagtttaagagtaactgaaagactactgaagatatattttttgttttgactttctcgaaacctcaggttaaatggagacaagtggctttgttggagcgtgatatccttctgaagaatctaaagactgtattagagtcactgagaggccgtgtgacaggcaaaactaaggctgaacttgaggactctatatctatggttggtttccttgtattctgtacgtaaagcataattttctttaggtttatctttcatcttgacctgcatttatatttaactgtatttgtttataaaatattatgctccacatagcctaatttaaaatttgaagtcctttcaattcccttactgttaattattatttataaaaatccagttacctgtggaggtgcattccttaattttggcagtttgattagagtaataatattttgcaggttgatattcttgctgtccagctctccaaaagagaagctgagctgcttcagcaaaaggcagaagtcacagaattagcaaaatcattaaagcttgtacgttccaatatgtttacttgcagtacttagcattgaattttacaaacttaagataacttgtgcattgtcattatctacagttttgagtttgttctattttcccctcttgctcgtaggcttctgaagatgccaaaaaaatcgttgacgaagaaagggcaagtgctcatacagagattgaaagtgctaggtcttctgtgcaaagagttcaacaagcacttcaggaacatgaaaagatgtccagaacaactggaaagcaagtatgtaaatataatttagcagtgcgttgctttcattagttcactgcatttccattactacaagctaacgggtgagatgtgttttcacttccaacttccaacatagttgctcagattcctctttatgtctttttttaccttctttttcttagaagttatctttcttagctaaattgtgtattacaacatttaatcaattcgtagggcttattcatctgtttgtacctctacaggaagaattttagaatgaagcacacacaaattatttaatgcgttgttatgcacatgtgcagcttttcttctgcatacacatttagtttgttgatcctgttcgtaattaccatagttagctttctaaacctgcaagtccatttagtctaattcttaacatctactcaccagctatactttactatcaccatcttttcatatgctctttcatgcatgtccataggtcaacatcatacattcatattcatttactctgttttcaatcattcaatctacaacgtttatgtgacctctatttgctgtttggaaggatatggaggaactaaagaaagaagttagagaggcgcgaagaatcaaaatgcttcattaccccagcaaggtataattgagtgtacttcttaatattttggtgtactgaatgaaatatgccaagtctattttttttatatcatgcatgacacatatagtgacttctctaggcaatggatctggaaaatgagatcaaaattttgcgtaagacgttcgttgagaggtccacggattgtgttaatcttttgaaagaggtatacatcaccaatactggcttcagttatttccaattttgcacctgtttcacatggtcgagatatctttatatccaaggttgaagccatgaagcatacatcgctcaacatgtgaaatgtctagagcgtagcgtgtgcttgaattaatgaaatacaaaagcaaacatggaacattaggaataggcctcatcaacctgtgtgcatgtataaaacagctatacaatctctaataggcatgatattcaggcacattatttctgtaagttttaaaatgctacgggaataataagcaagcaagttgaacatttaattggaataaatgaaaattcttatcaatcagtgacacggtgtgttttagtctatgtcaaagaccttgccatggttggctaatgttgaatattatcaatcagtgacaccatagatgcttcttatggtgctacttggatgaactattacaaaaaggtaaataggtgtatctaaaccagttttgtctggtcatcataacaaaccagtggtttgggccataataatagcctggttcagtccagccctgtcaattggatcagtaaagcatttggctagcatggtgtggtcgaatcggcctgaacagtgtggttgaatcagtctaacccagctccatctcccacgttggttaaattggataataattttgtgttcaccattgcttggactgcaacctcttgcctcacagctaattagaaagagcacaaaataacctgaagatataacctattgtgtacttcaacaataagaacataaataatgaaacagataatcaatctggagagaggtcaggtgctcagttggtttacgtgtggttgtgtgtgccttctttttttctccaaatatttctttccactgggtagagatctttctgtacagtagaataaaatatgcatatatagtactaattgtaactgtttttttttttcagttggaactgcacaaaaggccagagggaaatgatatccctttgtttgatttggagggtctccaatgcttaggctcaatactacgcatagtttctcagagcagtactaccatggatttctcaaatatttcaatccagtggttccgtgtacacccaaaagaaagtaacaaagagattatttcaggtgggactctctctctctctctctaatgttgtacaaagtaagccacatctttctcttttttgagtgaaaaaggtacatctgtttcttaatcttaattcacattattgtcttcttaaacactaaacaaagtttcacagaaaaggttctttctttctttttttttcctttcagtactaataaactattgcaaatatggaaaaccacaacctggtaaaatataactgccttattagggtaactttggcttacgattagagttttatttgcgtaaaaaaacgattagagttttataagttttatcaactgtttgattttcaaaaatagttcagggtgtcagtatttctgactttttttttgttcttggatttattaggtgccacaagatcagtatatgctcccgaaccacatgacgttggacggtatttggaagctgaaattaattatggtggtgaaattgctatagcaaagacagctgggccaatagaccctggtttgtttaattgaaaacatctttgggtaaaattatctgcatttcttgcatgactaacatgtgtttgtcgtttcttgacagacgctggattggtcgattatgtagagacactcgtaaggaaacgtgaaactgagttcaatgtatgattgtactatcctttaccactttatgccatttattttcacgctgtgtgtgatgtaaggcttttaattcagagtcttccgaccatattcatttcaccaaataagctgtatgtattgtcatggttccaaagctttctgctctatgcttgcagtagtattcaatatgtcatccactactttagtttgcattgcaataagattgttaaaccatattcgaaatcactgaaagtgcagaattttggttctctagggctttgtattttgacattatcatcaagtggttatcttaactattgctttgtttagtaaccaagtaatttgtgtcccatggcaggttgttgtgcttcagttgaatggaattgatcagccaaaagagtctgttcatgttctcaatattggaaaattgaggatgaggctttctaaaggaaagacagtggttgccaaggaattctattcgtcatcaatgcaggtagggttcaggaatgtcatatctatcttctattccattgttacatagtacctttttttttcccttacagtccaactgttctataattctatttcagctatgcggtgtccgaggtggcggtgaagcagcttctcaggcgatgttctggcggccgaggaatgacctcagcatggtcctggccttcgaaacgacgagagaacgcaacaccgcaatcatgctcacccggcgattcgccatagattgcaatgtatgctctcaggctaactccttgcagattgcatccaatttgccatgctatgctctcaggctaacacctcaactacatgattttttttcctccatgactgtttgcagatcatccttgccggtccaggcgacaagactccatgg

SEQ ID NO: 4663 - DNA, 2055 bp, Oryza sativa Japonica Group
gagaaaagagaggagagagagaggcaaacccgcaccaaaatctctctctctcccccagatttgcgccacattttcctcgccgaatcagcctcgccgccgtgggtgcagctgccgcgggatcccggcgagcgagcgccatttgagccggctgccggcgggtttgcgttctggaagctccttgctgtaaactattgaggggtaaagcctgctatttagtcaaggttgagggtgctgtataaatgacgcgggcgtccacaattgatttcgggcggaagacacataatgatgtcctctggtcagggccattgcgtcctgcaaacttcatcagaaataaattccctacatacaagaagagtttgaatgggatagttatcaaattgacagatgatcaagaaatgccatctctgaaagaggctgttgccaaggaaacagcagacctacttcatcggagtcagcgcctttcagtccgtgagcttgctatgaaatttgagaagggtcttaacactgccacattgttgtctaatgaggttaaatggagacaagctgctttattggagcgagacatccttctgaaaaatctaaagagtgtattagaatcgctgagaagtcgagttgcagggaaacataaggatgaaattgaggagtccctttctatggtggatgttttaacagttcagctgtctaaaagagaagacgagttgctgcagcaaaaggcagaggttgccaaaattgcaacctcattgaaactggcttctgaagatgccaggagaattgttgaagaagaaagatctaacgctcgcatagagatagataatgctagagctgctgtacaaaaagttgaacaattagttaaagagcaagaaattgatcctcaaataaatgggaaacaggatgaggatgaacttaaggaaaaggctcaagaagcacggagagtgaaaatgctgcattgtcccagcaaggcaatggacattgaaaatgagattgaagtcctacgtgaacaattagctgagaagtcctcaaattgtgttcatcttttgaaagagttacacctgcatcaaagctatgaggaaaacgatgtgtcctcgtatgagctggagggccttgaaagcttaggctcaatgttgcgcatagtttcccagagtgatggatatgttgatttatcaagaagtacaatacagtggttccgtgtgcagcctgaaggaaacaagaaagagataatttcaggtgccataaagcaagcatatgctccagaaccacatgatgttgggcggtatttgcaagctgagatcaaccattgcggtgaaatctctgtcgtgaagactgctggccctgtggatcctgctgcaggattggtcgattacgtagagactcttctaaggaatcctgaaactgaatataatgttgttgttcttcaagtgaatggaatcaaacagcctaccgattcaattcatgttctttccatcgggaaactgcggatgagactcgcaaaagggaagacagtaattgcaaaagaattctactcctcaacgatgcagctatgtggtatgagaggcggtggagatgctgcaccccaagcgatgtactggcaaccgaggagagacctgagcctggtgctgggcttcgagacggccagagaacgcaactctgcaatcatgctcgctcgcagatttgccatcgattgcaatatcatacttgctggtcctggggataaaactcactggtgattgatgaagacgaactgtaccagctaacctcttgtacgagctcagaccctgtgtttggaatcattgtacatctgtgtcgttgtagttagatactctaatacatatctgatctgtgaggtgtattgtagtgaggggtagtttagtagtagtaggttcgccaaggcatcgtttttactgccttgcgggtcagtctagtttagttggtacattatatttctcatttctgagagagagacacccacgcatgttgtagctgtgtcagtactctagtgtatgtaactttgttcatgaaactgtttaccaaacataatggactatccccctttctgct

SEQ ID NO: 4664 - DNA, 1867 bp, Zea mays
cccgccttctcattccaaagctcgccccgcgtcgccgcccctccgcggatcctccctccccttccctcgtgtgctccggcggcattctccttcccgctgccagggtcgaggatttcttgtagatgactcgagcttcgactatcgatttcggacggcggaagcagagcgagctcttcggctcagggccactgcgtccagcaaacatcatcagaaataaattccccacctacaagaatggttcgaatgggattgttatcaaattggccgatggcccagaaatgccatctctcaaggaggccgttgccaaggaggcaacagatctgcttgataggtgtcagcgcccttcagtccgagagctcaccatgaaattcgagaagggctttaacacagctaccttgctgtctaatgaggctaaatggagacatgcggctttattggagcgggacatccttctaaaggatcttaaaagtgtgttggaatcgctgagaggtcgagtagggggcaaaaataaagatgaaatcgtggagtctctatctatggtggatattttagccattgagctatccaaaagagaagatgagttgctccggcaaaaaacagaggtcacaaaaattgcagacacgctgaaactggcttctacagatgccaagagaattattgacgaagaaagagccaatgctcggttggagatagaaagtgctaaagcttctgtacaaaaaattcaatcagcacttaaagagcaggaacttttttctcaaagaactgggaagcaggatgtcgatgaactgaaggaagaagttcaagaagcacgaagagtgaaaatgctgcattgcccaagcaaggcaatggacattgagaacgagatccaagttctgcgtgatcaactggctgaaaaatcttcagattctcttcgccttttgaaagagttggagctgcatcgaagttacggggaaaatgacatgcccttgtatgaattaaagggtctagaaaccttaggctcaacgttgcgcatagttgttcacgagtgtgcctctgtagatttctcgaacagttcaatccagtggtttcgcatacagcctgaaggaagcaagaaagaaattatttcaggcgccacaaaaccagtatatgctccagaaccacatgatgtggggcggtacatccaagctgaagtcaaatctggtggccaaatctcagtcgcaaaaactgccggttcaatagatcctgctgcaggattggttgaatatgtagaaactctcgtgaggaatcctgaaactgattataatgtagtcattattcaagtaaatggagttgctcaggctgcagactccgttcacgttctttgcatcgggagattgcggatgagacttgctaaagaaaagacggtcgttgcgaaggagttctattcctcgtcaatgcagttgtgtggcgttagaggaggtggagacgccgctccccaatcgatcttctggcaacccagaaagggcctcagctttgtgctggcatttgagacaaccagagaacgcaactcggcgctcatgctcgcccggaggttcgccatcgactgcaatatcatccttggtggtccgggggacaaaacgtcatggtgaagtgaaacaaccagcgcactctggaacctgaagcctgaccgattcttgaattgcacatactgtagttcgattgtcgcatctgatcactgagagtagctgagctcagtttagcgttgtacgtacgtagtgccaactgccaagtgttggctccgattcattttttttaagtttaggactcgttgcgtgtactcgccggttgtgtagtgtagtagttatgtatacttgtgttcctgatgaagagctgaactacgagtgcctag

SEQ ID NO: 4665 - DNA, 1775 bp, Sorghum bicolor
cactaggtctcacttttctggagtcagggccgaggatttctcgtagatgactcgatcttcgactatcgattttggtcggaggaagcagagcgagctcttcgggtcagggccactgcgtccagcaaacatcatcaggaataagttccctacctacaagaatggttcaaacgggattgttatcaaattggtggatgccccagaaatgccatctcttaaggaggctgttgccaaggagacaactgatttgcttgataggtgtcagcgcctttcagtccgtgagctcaccatgaaattcgagaagggctttaacacagctaccttgttgtctaatgaggctaaatggagacatgcggctttattggagcgagacatccttctaaagaatcttaaaagcgtattggaatcattgagaggtcgagtagggggcaaaaataaagatgaaattgaggagtctctatctatggtggatattttagcagttgagctatccaaaagagaagatgagttgcttcagcaaaaaacagagatcaccaaaattgcagccacattgaaactggcttctaaagatgccaagagaattgttgatgaagaaagagctaatgctcggttggagatagaaagtgctaaagctgctgtacataaaattcaattagcacttaaagagcaggaaaatttttatcaaagaactgggaagcaggatgttgatgaactgaaggaagaagttcaagaagcacggagagtgaaaatgctgcattgcccaagcaaggcaatggacatcgagaacgagatccaagttctacgtgaccaactgtctgaaaaatcttcaacttctcttcaccttttgaaagagttggagctgcatcgaagttacgaggaaaatgccatgcccttgtgtgaattaaagggtctagaaaccttaggttcaatgttacgcatagttgttcaagattgtgcacatgtagatttttcaaattgttcaatccagtggtttcgcatacaacctgaaggaagcaatcaagaaattatttcaggtgccacaaagccagtatatgctccagaaccacatgacgtggggcgttacatccaagctgaaatcaaattcggtggtcaaatctcaatcgcaaagactgctggtccaatagatcctgctccaggattggttgattatgtagaggctcttgtgaggaatcctgaaactgattataatgtagttattcttcaagtgaatggaattgctcaggctgcagattctttacatgttctttgtattgggagattgcggatgaggcttgctaaagaaaaggcagtcgttgcgaaggagttctattcgtcgtcaatgcagttgtgtggcgttagaggaggtggagacgctgctccccaagcgatcttctggcaaccaagaaaggatctcagctttgtgctggcctttgaaacaaccagagagcgcaactcggcactcatgctggcccggagattcgcgatcgattgcaatatcatccttactggtccaggggataaaactccagcgcactctgaaacctgaagtctgaccctttcttgaatgtacatctctgcacatgcagtagttagatatctcatctgatctctgagtaattgagttcagtttagcagtagtatacctaagtgccaggcattgacaccgattcatttttcagtgtaggactcgttacatttgtactcgctattccacaacgccaacggtcgagtaggaaacgcttccggctgacagaaaataaagtatatagtagcgaaaa

SEQ ID NO: 4666 - DNA, 2153 bp, Hordeum vulgare subsp. vulgare
ggccgaggagacagagggcacgaggagagcagggcgaagaccgcgcagagagacgagagagagagagagagagagagagggataaacctccctcccatttttatcgcaccaaaaacccaccgcgaaactctcttccagattcgctccacgttccccgcaggtctccgaatcgagcccccagcccccaatgcgcgcgccagcagcggaccaggccgccgcgagcgcgagatccgggagggagcgccgtttgacctgaccggagcagacggctccgactccgagcgccgccgcgttccgccagggttgcagggttggcgctccggggtgaaaaatacttaccgatgactcgggcatcaacacttgattttcggcggaaggcgcagaatcagaacaactggtctgggccgttgcgcccagcaaacatcatcagaaataaattccctacctacaagaatggtttgaatgggatagtcatcaaatttgcagatgagccagaaacaccatctcttaaggagtctgttgccaaagagacagaagatctgcttggtcggcgtcagcgtctttcagtccgcgagctcgcaatgaaatttgagaagggcctcagtactgccacattattgtctaacgaggttaaatgtaaacaagtggctttattggagcgagacatccttctgaagaatctgaagagtgtattggagtcactgagaggtcaagtagctggcaaatataaggatgaaatcgaggaatcagtatctatggtggatattttagcagttcagctatccaaaagagaaaatgagttgcttcagcagaaaaccgaggtcacgagaatagcgacttcactaaaactggcttctgaagatgctaggagaattgttgacgaagaacgaactaatgcccgcacagagattgaaaatgctagagctgctgtacaaagagttcaaaaagtacttaaagagaaagagaacagttcacaaagaattgtgaagcaggatgtggatgaacttaaggaaaaagttcaagaagcacggagagtcaagatgctgcattgccccagcgaggcaatggacataaaaagcgagatccatgttctacgtgatcaatatgctgagatatcttccagttccactcatctcttaaaagagttgaagttgcatcaaagttttaaggaaaatggtgtgctctcatgtgggttggagggtctcgaaagcttaggctcaatgctgcacgtagttgtcgacaatgatgtggccttatcgaacaattcagtacaatggttccgcatacagcctgggggacacaagaaggaaatcatttccggtgccacaaagctagtatatgctccagaacctcatgacgtagggcggtacttgcaagctgaggttaaccttggtggtgaaatctccgtcgcgaagactgctggtccattagaccctgcaccaggtttggtcgattatgtagagacccttgtaaggaatcccgaaaccgactacaatgttgttgtccttaaagtgaacggaatcaaccagcctacagactccatccacgtcctatgcgtcgggaaactgcggatgcgacttgccaaaggaacgacggtcgtggccagggaattctactcgtcgtcgatgcagctatgtggtgttaggggcggtggagatgctgcaccacaagcaatgttctggcagcccagggaaggcctcagcttggtcctgggcttcgagacgcccagggagcgcaactcggggatcatgctcgcccggagattcgccatcgattgcaacattgtgcttgccggtccaggggacaaaactccgtggtaacacaaccaagcacatcagctaacttagttctgaccattgacggaatcagtgtacatctatctctgtgcagtgcacggcggcgtctgtttagtagtagctcaatgcctacttggcatcggttcatagttttgttgcctatgtttcttcatcttacttattctttcacgtcaatgtatcctgctagttagtattttgctaggtagagcagcgtgttttttaattttattttcctgagaccctggtgcgagatctatagctgtgtgccagcgccattgtaattttttttgtgaactagtataagaatgtgatgctgatgcagaccatcatacccag

SEQ ID NO: 4667 - DNA, 673 bp, Coix lacryma-jobi
atgggacaaaaaataaatccactcggtttcagacttggtacaacccaaaatcaccattccttttggttcgcacaaccaaaaaattattctgaaggtctacaggaagataaaaaaatacggaattgtatcaagaactatataaaaaagaataggaaaaaaggctcgaatagaaaaatggaatcagactcaagttctgaagtaattgcacatatagaaattcaaaaagaaatcgatacaatccacgtcataatccatattggattccccaatttattaaagaaaaagggagcaatcgaagaattagagaaagatctccaaaaggaagttaattctgtaaaccagagacttaatattgctatcgaaaaggttaaagaaccttatagacaacctaatattcttgcggaatatatagctttccaattaaaaaatagagtttcattccgaaaagcaatgaaaaaagctattgaattaactaaaaaagtggatataaagggaataaaaatccaaattgcgggtcgtctagcaggaaaagaaattgcacgtgccgaatgcatcaaaaagggtagactacccctccaaacaattcgcgctaaaattgattattgctgctatccaattcgaactatctatggagtattaggtgtcaaaatttggatattcgtagaagaagaat

SEQ ID NO: 4668 - DNA, 717 bp, Indocalamus longiauritus
atgggacaaaaaataaatccactcggtttcagacttggtacaacccaaaatcaccattccttttggttcgcacaaccaaaaaattattctgaaggtctacaggaagataaaaaaatacggaattgtatcaagaactatatacaaaagaataggaaaaaaggctcgaatagaaaaatagaatcagactcaagttccgaagtaattacacataatagaaaaatggactcaggctcaagttctgaagtaattacacgtatagaaattcaaaaagaaatcgatacgatccacgtcataatccatattggattccccaatttattaaagaaaaaaggagcaatcgaagaattagagaaagatctacaaaaggaagttaattctgtaaaccagagacttaatattgctattgaaaaagttaaagaaccttatagacaacctaacattcttgcagaatatatagctttccaattaaaaaatagagtttcattccgaaaggcaatgaaaaaagccattgaattaactaaaaaagcagatataaggggggtaaaagtaaaaattgcaggtcgtctcgcagggaaagaaattgcacgtgccgaatgcatcaaaaagggtagacttcccctccaaacaattcgcgctaaaattgattattgctgctatccaattcgaactatctatggagtattaggtgtaaaaatttggatattcgtagacgaagaa

SEQ ID NO: 4669 - DNA, 720 bp, Puelia olyriformis
atgggacaaaaaataaatccacttggtttcagacttggtacaacccaaaatcaccattccttttggttcgcacaaccaaaaaattattctgaaggtctacaggaagataaaaaaatacggaattgtatcaagaactatatacaaaagaataggaaaaaaggctcgaatagaaaaatagactcagactcaagttccgaagtaattacacataatagaaaaatagactcaggctcaagttccgaagtaattacacatatagaaattcaaaaagaaatcgatacgatccacgtcataatccatattggattccccaattttttaaagaaaaaaggagcaatcgaagaattagagaaagatctacaaaaggaagttaattctgtaaaccagagacttaatattgctatcgaaaaagttaaagaaccttatagacaacctaacattcttgcagaatatatagctttccaattaaaaaatagagtttcattccgaaaggcaatgaaaaaagccattgaattaactaaaaaagcagatataaagggagtaaaagtaaaaattgcaggtcgtctcgcagggaaagaaattgcacgtgccgaatgcatcaaaaagggtagacttcccctccaaacaattcgcgctaaaattgattattgctgctatccaattcgaactatctatggagtattaggtgtaaaaatttggatattcgtagacgaagaataa

SEQ ID NO: 4670 - DNA, 717 bp, Bambusa emeiensis
atgggacaaaaaataaatccactcggtttcagacttggtacaacccaaaatcaccattccttttggttcgcacaaccaaaaaattattctgaaggtctacaggaagataaaaaaatacggaattgtatcaagaactatatacaaaagaataggaaaaaaggctcgaatagaaaaatagaatcagactcaagttccgaagtaattacacataatagaaaaatggactcaggctcaagttccgaagtaattacacatatagaaattcaaaaagaaatcgatacgatccacgtaataatccatattggattccccaatttattaaagaaaaaaggagcaatcgaagaattagagaaagatctacaaaaggaagttaattctgtaaaccagagacttaatattgctattgaaaaagttaaagaaccttatagacaacctagcattcttgcagaatatatagctttccaattaaaaaatagagtttcattccgaaaggcaatgaaaaaagccattgaattaactcaaaaagcagatataaggggagtaaaagtaaaaattgcaggtcgtctcgcagggaaagaaattgcacgtgccgaatgcatcaaaaagggtagacttcccctccaaacaattcgcgctaaaattgattattgctgctatccaattcgaactatctatggagtattaggtgtaaaaatttggatattcatagacgaagaa

SEQ ID NO: 4671 - DNA, 1797 bp, Zea mays
ccacgaaccgcgctcggtcttctccctcaacggaacgcgacttcttcgccgcgcgcgctggaatccctggccatatatcctggacgcacgacctcctctccttctgcccatccatggcgctcggcacccagtgcccctgctcctcttcctggcagccgggtggagctcccccccatgggcgagcctccaaccttccctttgagctcccacaaacccaagtacagggtgcccccgcgagctccatggccgcgcgtgccaggccttcgccatctatggagctcggcgttgcccccttcgccgcgcgctgctcatcctctccaccgctcggagatccgcccgatgcctcaccagagcgtgtggatgtcgcggcgtccaccaattcgggggtcatggcgtcgtatctggggcgatttcttgccggtgatgaagctccgctgcggaccacaaatcctccgtgggcgggcctctgcacgtcgtttccgccgcacgaggacacgtgtcatctgaagagcaagttggtacctggaatctcaagacccaggcaagttgtgcccttgatcacttctttttacccactcatgttctaattaatcataatgatctgcataggttaatttgatgggacccaataggttaccctagtttgtctatctttataccttgtttatcactgaactttttgggtagtacttgctagtgctttatgtggttttgggtatgaagatacattattcatgatcacacttttattatctgtttattatcactgttcatgataagatcattatgttaattggaacatggagaaccacccgggaaaacagtgctaccacaagggtttaatgggacgcccttggccgattaattaggaaagctagtggaagactaccttacccgaaaggggcaagggcagtaggggagtggtcagtgtagggaggccctcgggaggattttgctgtgatggcggtcctgcaagggattcctgggaaggccctcgggaggattttgctgtgatggcggtcctgcaagggattcctagggaggccctcgggaggattttgctgtgatggcggtcctgcaagggattcctgcattggagcttcctataaactgtagcgggttttctgaagctagtggaactttgtaaaggcctcgtagtgttaccctgcctcgcctcctcggtagaggtgtatgggaagtcgcgatcccttggcagatgggtaacatgacttgtgggtaaagatgcgcaacctctgcagagtgtaaaactggtatactagccgtgctcacggtcatgagcggctcggacactcacatgattaatctatggaacttaaattcaatttgtcatatgcattgcatcgcaggtgatgatgttacttctgttctactatttaattgggttggtatttacttatacttagttatggctaataaaattttgaccaactttaaaagcaatgctcagcttcagccatcctctttggtaagccttacacttcacgtgagctcccacctttggcgagttcatgcacattattccccacaacttgttgagcgatgaacgtatgtgagctcactcttgctgtctcacaccccccccccacaggtcaagaacaggtaccgcaggatgaggcgcttgaaggatgctgcgttgagttcgtgagtggtctaggtcgtcgtctcccagtcaactttgggttgctggaccgttgtctccttataatgtaattatttattttgtatagaactcctgttatatataaagatgtgacattcgatcctgtgccactttac

SEQ ID NO: 4672 - DNA, 2050 bp, Hordeum vulgare subsp. vulgare; identical to SEQ ID NO: 1582

SEQ ID NO: 4673 - DNA, 2081 bp, Sorghum bicolor
aagacgtaacgcaacgaacgccaacaaacaaacagagccagcggcgcaaccgccgccgctgaaccgcgccgcaacccgcaggagatcgagcccctcctccattcctcggcgccggcagcttcggttgttcgttcgccatggccggcggggagagggacgacgcggtggcgatggactccggcgagaagcgcctcaacgagctcggctacaaacaggagctccgcagggagatgacgctgttcaagacgctggccatctccttctcgacgatgacgctcttcacggggatcacgccgctgtacgggagcagcctgcagtacgcggggccggcgccgctcgtctggggctgggtcgtcgtctccttcttcacctggttcgtcggcatcgccatggccgagatctgctcctccttcccgaccactggttctctgtatttctgggctgctcatttggctggtccagtctggggtcccttggcatcttggtgctgtgcttggctggaggccatcggcctcattgccggaattggcacacaggcatatgcaggatcccaagtattgcaaagcatcatcctactctgcaccggcaccaacaccggcggtggctacctggcccctcgctggctgtttctggtcatgtacatcgggttgacactgatctgggccgtgctcaacacttttgctcttgaagtcatcgcgttcctcgacgtgatctccatgtggtggcaggtgatcggtggcaccgtgatcgtgatcatgctcccgctggtggccaagacgacgcagccggcgtcgtacgtgttcacccatttccagacgtcgcccgacgtgacggggatcagcagcagctcctacgccgtcgtcctgtccttcctcgtgagccagtactcgctgtacgggtacgacgcggcggcgcacctgacggaggagaccaaaggcgccgacaagaacgggcccatcgccatcctctccagcatcggcatcatctccgtcttcggctgggcgtacatcctggcgctcaccttcagcatccaggacttcagctacctgtacgacgcgagcaacgagaccgccggcgcgttcgtgccggcgcagatcctgtacgacgcgttccacgggcggtacggcagctcggcgggcgccatcgtgctgctgctcgtcatctggggatccttcttcttcggcgggctgtccatcacgacgagcgcggcgcgggtggtgtacgcgctgtcgcgggacaggggcgtgccgctgtcgtcggtgtggcgccggatccacccgcggcacaaggtgccggcgaacgcggtgtggctgtgcgcggcggtgtgcgcgctgctgggcctgcccatcctgcgcatcaacgtggtgttcacggccatcacctccatcgccaccatcgggtgggtgggcggctacgcggtgcccatcttcgcgcgcatggtgatgcgggaggacgacttccgcccggggccattctacctcggccgcgcaagcaggcccgtctgcctcgtcgccttcctgtggatctgctacacctgctccgtgttcctgctccccacagtgtacccgatcaagatggacaccttcaactacgcgcccatcgcgctcggcgtcgtcctcggcctcatcatgctctggtggctgctcgacgcgcgcaagtggttcaagggccccgtcaggaacatcgacgaacacaacaacggcagcaaggtctgacacaccaccaacgtcgtcgtcgtcaagctcaagcaaagcctcgagccactcacgccatcctctctttttgaacaccatgggtgctgatgaacaccatgctctctccgtctgtgtgtatgatgctggatcagtggggtttagttagtttagattgtggagtgagacctctgggtgacatacaaggaaactagaggttgacccattgtggagaacagaggaaaaattgagcaaacagaaaaggaatatgaatgaccaacaaagtacaagcattggggacactgatgtatgctccctgtgtaactatgttattttaggcttgttctaagacaaacttcccaaacaatttaattttgatcaagtttttag

SEQ ID NO: 4674 - DNA, 2037 bp, Zea mays
atataaattccacaccgctcgctgccgtgcccgcacctgtgctgtgcataacgaacgccagcaaacaaacagcgccgcaacccaccctatagcgcaggaggagaggagcccctcctcccgttcccataaatcccattcgcacggcgaggcgagacgaggcgagggcaactgggcctgggctgccggcagagcttggaccgctcgccatggccggcggcggggagagggagggcgcgcaggcgatggactccggcgagaagcgcctcaacgagctcggctacaagcaggagctccgcagggagatgacgctgttcaagacgctggccatctccttctccacgatgacgctcttcacggggatcacgccgctgtacgggagcagcctgcagtacgcggggccggcgccgctcgtctggggctgggtcgtcgtctccttcttcacctgcttcgtcggcgtcgccatggccgagatctgctcctccttcccgaccactggttctctgtatttctgggctgcacatttggcaggtccagtctggggtccgttggcgtcttggtgctgcgcttggctggaggccatcggcctcattgccgggattggcacacaggcatacgcaggatcccaggtactgcagagcatcatcctgctctgcaccggcaccaacacgggcggtggctacctggcccctcgctggctgttcctggtcatgtacatcgggctgacactgatctgggccgtgctcaacactttcgcgctcgaagtcatcgcgttcctcgacgtgatctccatgtggtggcaggtgatcggtggcaccgtcattgtggtgatgctcccgctggtggccaagacgacgcagccggcgtcgtacgtgttcacccacttccagacggcgcccgacgtgacggggatcggcagcagcgcctacgccgtcgtcctgtccttcctggtcagccagtactcgctgtacgggtacgacgcggcggcgcacctgacggaggagaccaaaggcgccgacaagaacggacccatcgccatcctctccagcatcggcatcatctccgtgttcggctgggcgtacatcctggccctcaccttcagcatccaggacttcagctacctgtacaacccgaacaacgagaccgccggcacgttcgtgccggcgcagatcctgtacgacgcgttccacgggcggtacaacagctcggccggcgccatcgtgctgctgttcgtcatctggggctccttcttcttcggcgggctgtccatcacgacgagcgcggcgcgggtggtgtacgcgctgtcgcgggaccaaggcgtcccgctgtcgtcggtgtggcgccgtatccacccgcggcacaaggtgccggcgaacgcggtgtggctgtgcgcggcggtgtgcacgctgctgggcctgcccatcctgcgcatcaacgtggtgttcacggccatcacctccatcgccaccatcggctgggtgggcggctacgcggtgcccatcttcgcgcgcatggtgatgcgggaggacgacttccggccgggccccttctacctcggccgcgccagcaggcccgtctgcctcgtcgccttcctctggatctgctacacctgctccgtcttcctgctccccaccgtctaccccatcaagatggacaccttcaactacgcgcccatcgcgctcggcgtctgcctcggcctcatcatgctctggtggctgctcgacgcgcgcaagtggttcaagggccccgtccggaacatcaacgaccaccacaacggcaagggctgaacacctacgcacgcamgtcaagccaagcttcgactagaggtcacatcaagcgtttgactttcaaataggagtatgcaatatagacccacccaactgtactagattcgtctcactttttaatcttcggctgagaaattagttttataatccgactacatttaataccccgaacggaggttcaaacattcgatgtgataggggctaaattttagcaggggcaaaccaaacaccccctcaaaaaaaaaaaaaaaaa

SEQ ID NO: 4675 - DNA, 2004 bp, Oryza sativa Japonica Group
tttgcctcccttcctacccaacacgaggcagagaggagaagctccccccgctcaactcaccaaaaccctcctcccctcgaaatccttcccaagacgccgcacgcttctccatttcatataagattcccgagagacgccgccgcccgagaggcgtgggccgcgcgcgccgaaacatatcccgccggggcgccgccatggccggcgaggtggccatcgactccggcgagaagcgcctcaacgagctcgggtacaagcaggagctccgcagggagatgactctgttcaagacgctggccatctccttctcgacgatgacgctgttcaccgggatcacgccgctgtacgggagcagcctgcggtacacggggccggccagcctcgtctggggctgggtcgtcgtctccttcttcacctggttcgtcggcttcgccatggccgagatctgctcttccttccccaccactggttctctgtacttttgggctgctcatctggctggcccagtctggggcccgttggcatcttggtgctgtgcttggttagaggccataggtcttattgccggaattggtacacaggcattcgcgggatctcaagttctgcagagcataatcctgctatgcaccggcacgaacaaaggcggcggctacctgacccctcgctggctgttcctcctcatgtacatcggcctaaccttcatctgggccgtgctcaacaccttcgcgctggaagtcatcgccttcctcgacctgatctcgatgtggtggcaggtgatcggtggcacggtgatagtgatcgtgctgccgctggtggcgaagacgacgcagccggcgtcgtacgtgttcacgcacttcgagacggcgccggaggcgaccgggatacggagcagcgcctacgccaccatcctgtccctcctggtgagccagtactccctgtacggctacgacgcggcggcgcacctcaccgaggagaccaagggcgccgacaagaacgggcccatcgccatcctctccagcatcggcatcatcaccgtcttcggctgggcctacatcctcgccctcaccttcagcatccaggacttcagctacctgttcgacccgagcaacgagacggccggcacgttcgtgccggcgcagatcctgttcgacgcgttccacggccggtacggctcctccgcgggcgccatcgccctcctcttcgtcatctggggctccttcttcttcggcggcctctccatcaccaccagcgccgcgcgcgtcgtgtacgcgctgtcccgcgaccgcggcgtcccgctctcctccgtgtggcgccgcgtccacccgcgccaccgcgtccccgccaacgccgtctggctctgcgccgccgcgtgcgcgctgctgggcctccccatcctgtggatcaacgtcgtcttcacggccatcacgtcgatcgcaaccatcggctgggtcggcggctacgccgtgcccatcttcgcccgcatggtgatgcgggaggaggacttctcgccggggcccttctacctccggcgcgcgtcgcggccggtgtgcctcgtcgcgttcctgtggatctgctacacctgcaccgtgttcctcctcccgacggcgtacccgatcagcgccggcaacttcaactacgcccccgtcgcgctcggcgcctgcctcggcctcatcgggctctggtgggtgctcgacgccaggaggtggttcaagggacccgtcaggaacatcgacgatcctctgaaagatggtggtggtgatggcgtccataacaatggcaacaaggtctaagtatggtttaggttgttactggagtacttagtttgagcagatcattagctcaagccaaattgatcacattctcgatagagtttttttttccctctcttgtgttgtctcctactttgttgtgtacgtgtactattctgtgacactatcaatggggttagtttaggatgtggagaaaactttgtgccatatagaatgacttaaattagttacatgtatc

SEQ ID NO: 4676 - DNA, 1617 bp, Populus trichocarpa
atgggatttagacgaccagaggcagcacaagtccaagaaatggatcccggggagaagcgactcaatgaactgggatacaagcaagagctcagaagagaaatgactttgttcaaaactcttgcaatatcattttcaacaatgacccttttcacagggattactcccctgtatggttcaagccttctatatgcaggtcctgcaagtcttgtctggggatgggtggttgtatctttcttcacctggtttgttggcattgcaatggctgagatctgttcctcttttccaacaaccgggtctctctatttttgggcagctcatttagcaggtcccagatggggaccgtttgcatcatggtgttgtgcttggcttgagaccatagggctagtcgcaggcatcggtacacaggcatatgcaggttcacaaactttgcagagtatcatcttattgtgcaccggaacaaataaagatggaggatattttgcacctaaatggttgttcttatgcatgtacataggcctcacattgatatgggcagtgctcaacacatttgcattggaagtaatagccttcattgatgtaatttcaatatggtggcaggttattggagggttggttatagttataatgcttcctctggtgtcgcttactacacaatctgcttcatatgtattcactcattttgaaaccgcgcctgactcgacaggaatatcaagcaaaccttacgtagtcgttctatctttccttgtcagtcagtattccttgtatggatatgatgcagcagcccatcttacagaggaaactaaaggtgcagataaaaatggtcctattgcaattctttctagcattgggatcattacggtatttggctgggcttatatcctagcccttactttcagtattcaggtatgtttggctagtcgtacaactgcccttctgattcctgattttggctacctatacgatccaagcaatgagactgcaggtgcatttgtgccagctcaaatactctatgatgcattccaaggaagatatcataattctgctggagcaatcgttttactgttcatcatatgggggtcatttttcttcggtgggctctcaatcaccaccagtgcagctagagtggtgtatgctttatcaagagatgaaggaattcccttttcatccatctggcgaaaaatccacccaaagcataaggttccctcaaatgcagtgtggctatgtgcagccatctgcattcttcttggactcccgatcttgaaagtcaatgtagtcttcactgccataacttccatatgtacaattggatgggttggaggctatgcagttccaatctttgcaagaattgtaatggacgagaagaatttcaaagctgggccgttttacctaggcagagcaaggaggccagtttgcatcattgcctttctgtggatttgttatacctgttcagtctttcttctgccaacttattaccccctttcctggaatactttcaactatgcgccggtggctataggtgttggtttgagttcgataatgctctggtggatgctggatgcaaggaaatggttcaagggacctgttagaaatattgatatttcaaatgggaaggtttaa

SEQ ID NO: 4677 - DNA, 3199 bp, Vitis vinifera
atggctcacggccaaccgagagtcggagtcatggattcaggggagaagaggctgaatgagctggggtacaagcaagaactcagaagagaaatggttatttttgtgttcttttttctcctccttttcttcttgtttgattagctcttacacttcttttttttttcttttttaatcctgagacgtactgatttgggtttagggtgggtggaaatattagaaactaaaaaacatgggacgtctcatagttcttttacctgtgttccctttcctcctttggttgaatcaaatcaagtatgtgttttttttgtgtgtggagtttggattttatttatggtaactgttaaggggcaaggcttctgtaataagacttgctcctctatgactatgacaagagtattgatttggggtggcttactttattattcatttgcagactttgttcaaaactcttgctatatcgttttcaactatgacacttttcacagggataactcccttgtatggttcaagcctgctatatgcagggcccgccactctcgtctgggggtggattgtagtgacattcttcacctggtttgttggagtagccatggccgaaatctgctcatcttttccggtttgtaccatttccttgcttctttcttcttcttcttcttcgtcttcttcatatttgccttaattcttttagtcgaattaaaatgagtcaaaatggtcatgaaattgagtgaagtgatgtattttggcggttctaaatatccagacgacaggttctctatacttctgggctgctcatttggctggccccaaatggggtccatttgcatcatggtgctgcgcttggctggagacaattgggcttattgctggtataggcacacaggtagttgctcttcatcatacataatctgtgggcacttggcacttggattctgactgctgacaactctctgtgcttcatgtcacaggcttatgctggatctcagacactgcagagtatcattttattatgcactggaacaaataaagatggcgggtactatgctcctcgatggttattcttatgtatgtacatgggtcttacgattatatgggctgtgctcaacacctttgcattagaagtcattgccttcattgacattatttcaatatggtggcaggtaaattttatgagcacaagcctctttttcatgctcacaatgccataaaatcactccaaagttattcaataatgttgtgtttggtttctaagaaaaccaagcaatcatgcaacaaatggttcaacatcagatattaagtttccaattttcttttcttgtctatcttcaaccaaacagagcttcttaagtcttagctcattatctttttcacacacacacttgtaatgtggaaaacatgcatatccaagtactcttagttccattttgctcactttgtaattccaacttgttcttcaaagctttgttttttccccttatcaactactatgttgggcaaattaggggaaattaatggtgataaattatacattgtaattatcttttgcaggtcattggagggttagctattgttattatgcttcccctggtagcactgactacacaatccgcttcatatgttttcactcattttgaaacagcatctgaatcaaccgggatatcaaatgtagtttatgcagccattctatctgttcttgtcagtcaatattcactatatggatatgatgctgcagcacatctaactgaagaaacaaaaggtgccgataagaatggtccaattgccatcctttctagtatagggatcatttccatattcgggtgggcttacatcttggctcttactttcagcattcaggtatacctttatttcaacagaaaataagctttcaaattgagtcaagatgaacttttcagcaacttgtgctaatatcttctagcaaaatataatagcaacatcatgtcaagtaaaaacttggattatgtgattgagaaatatcagtgggaagtagggaaaagatttcctgtgccacacctttcctactttaaaccgaagacttggactgtctaggattatgtttacaaaaccatcctgcatctgtttagtcagagcctaaggctcaatttggttgccaagggagagtccagccaaaattgctgcaggtgaaatgtttttgttctgtttcatcactcttattggcaacaaaatggagcatacagaaaaaagtaaaaggctacaggattgaactttcaaaagctttcactggaaagtaggcagtacctccctcttgtagagcccatgcatgagtggtagtataaattctgaagttttgattgcaacttgtcatgcaggaccccagctacctgtatgacccaaccaatgagactgctggagcatttgtgccagcccaaatactttatgatgcattccatggacggtatcacaatgctactggagcaatcatcttgctttttatcatatggggatctttcttctttggtggactttcaatcacgaccagtgcagctagagtggtaagtaaagtaacatggtttttcttacaaatttatagatggcatttggggaaaatgaacttgatattttgaccttccacctttaaaaggccttctcagttgtgtcagtaaatgtacaatttttgttggtaaattttctccttgcacttgaccagaccaatgtttccatctgcatggttcaggtatatgctctgtcaagagatgaagggattcctttttcatccatatggcgaaaagtccacccaaagcataaggttccttcaaatgcagtgtggctttgtgcagtcatctgcattcttcttgggctcccaatcttgaaagtcaatgtggtctttactgctataacttcaatatgtacaattggatgggtgggtggttatgcagttcccatctttgcaagaatggtgatggctgagaagaacttcaaaccagggccattttatttgggcaaagcaagaagaccagtttgcttggtagcctttctatggatttgttacacatgctgtgtcttccttttgcctactttttacccgattacttgggatactttcaattatgccccagtggcattaggtgtgggtttaggcctcataatgctttggtggatgttggatgcaaggaaatggtttaagggacctgtaaggaacattgatattcagaatgggaaggtt

SEQ ID NO: 4678 - DNA, 1539 bp, Vitis vinifera
atggattcaggggagaagaggctgaatgagctggggtacaagcaagaactcagaagagaaatgactttgttcaaaactcttgctatatcgttttcaactatgacacttttcacagggataactcccttgtatggttcaagcctgctatatgcagggcccgccactctcgtctgggggtggattgtagtgacattcttcacctggtttgttggagtagccatggccgaaatctgctcatcttttccgacgacaggttctctatacttctgggctgctcatttggctggccccaaatggggtccatttgcatcatggtgctgcgcttggctggagacaattgggcttattgctggtataggcacacaggcttatgctggatctcagacactgcagagtatcattttattatgcactggaacaaataaagatggcgggtactatgctcctcgatggttattcttatgtatgtacatgggtcttacgattatatgggctgtgctcaacacctttgcattagaagtcattgccttcattgacattatttcaatatggtggcaggtcattggagggttagctattgttattatgcttcccctggtagcactgactacacaatccgcttcatatgttttcactcattttgaaacagcatctgaatcaaccgggatatcaaatgtagtttatgcagccattctatctgttcttgtcagtcaatattcactatatggatatgatgctgcagcacatctaactgaagaaacaaaaggtgccgataagaatggtccaattgccatcctttctagtatagggatcatttccatattcgggtgggcttacatcttggctcttactttcagcattcaggaccccagctacctgtatgacccaaccaatgagactgctggagcatttgtgccagcccaaatactttatgatgcattccatggacggtatcacaatgctactggagcaatcatcttgctttttatcatatggggatctttcttctttggtggactttcaatcacgaccagtgcagctagagtggtatatgctctgtcaagagatgaagggattcctttttcatccatatggcgaaaagtccacccaaagcataaggttccttcaaatgcagtgtggctttgtgcagtcatctgcattcttcttgggctcccaatcttgaaagtcaatgtggtctttactgctataacttcaatatgtacaattggatgggtgggtggttatgcagttcccatctttgcaagaatggtgatggctgagaagaacttcaaaccagggccattttatttgggcaaagcaagaagaccagtttgcttggtagcctttctatggatttgttacacatgctgtgtcttccttttgcctactttttacccgattacttgggatactttcaattatgccccagtggcattaggtgtgggtttaggcctcataatgctttggtggatgttggatgcaaggaaatggtttaagggacctgtaaggaacattgatattcagaatgggaaggtttag

SEQ ID NO: 4679 - DNA, 3166 bp, Vitis vinifera
gattcaggggagaagaggctgaatgagctggggtacaagcaagaactcagaagagaaatggttatttttgtgttcttttttctcctccttttcttcttgtttgattagctcttacacttcttttttttttcttttttaatcctgagacgtactgatttgggtttagggtgggtggaaatattagaaactaaaaaacatgggacgtctcatagttcttttacctgtgttccctttcctcctttggttgaatcaaatcaagtatgtgttttttttgtgtgtggagtttggattttatttatggtaactgttaaggggcaaggcttctgtaataagacttgctcctctatgactatgacaagagtattgatttggggtggcttactttattattcatttgcagactttgttcaaaactcttgctatatcgttttcaactatgacacttttcacagggataactcccttgtatggttcaagcctgctatatgcagggcccgccactctcgtctgggggtggattgtagtgacattcttcacctggtttgttggagtagccatggccgaaatctgctcatcttttccggtttgtaccatttccttgcttctttcttcttcttcttcttcgtcttcttcatatttgccttaattcttttagtcgaattaaaatgagtcaaaatggtcatgaaattgagtgaagtgatgtattttggcggttctaaatatccagacgacaggttctctatacttctgggctgctcatttggctggccccaaatggggtccatttgcatcatggtgctgcgcttggctggagacaattgggcttattgctggtataggcacacaggtagttgctcttcatcatacataatctgtgggcacttggcacttggattctgactgctgacaactctctgtgcttcatgtcacaggcttatgctggatctcagacactgcagagtatcattttattatgcactggaacaaataaagatggcgggtactatgctcctcgatggttattcttatgtatgtacatgggtcttacgattatatgggctgtgctcaacacctttgcattagaagtcattgccttcattgacattatttcaatatggtggcaggtaaattttatgagcacaagcctctttttcatgctcacaatgccataaaatcactccaaagttattcaataatgttgtgtttggtttctaagaaaaccaagcaatcatgcaacaaatggttcaacatcagatattaagtttccaattttcttttcttgtctatcttcaaccaaacagagcttcttaagtcttagctcattatctttttcacacacacacttgtaatttggaaaacatgcatatccaagtactcttagttccattttgctcactttgtaattccaacttgttcttcaaagctttgttttttccccttatcaactactatgttgggcaaattaggggaaattaatggtgataaattatacattgtaattatcttttgcaggtcattggagggttagctattgttattatgcttcccctggtagcactgactacacaatccgcttcatatgttttcactcattttgaaacagcatctgaatcaaccgggatatcaaatgtagtttatgcagccattctatctgttcttgtcagtcaatattcactatatggatatgatgctgcagcacatctaactgaagaaacaaaaggtgccgataagaatggtccaattgccatcctttctagtatagggatcatttccatattcgggtgggcttacatcttggctcttactttcagcattcaggtatacctttatttcaacagaaaataagctttcaaattgagtcaagatgaacttttcagcaacttgtgctaatatcttctagcaaaatataatagcaacatcatgtcaagtaaaaacttggattatgtgattgagaaatatcagtgggaagtagggaaaagatttcctgtgccacacctttcctactttaaaccgaagacttggactgtctaggattatgtttacaaaaccatcctgcatctgtttagtcagagcctaaggctcaatttggttgccaagggagagtccagccaaaattgctgcaggtgaaatgtttttgttctgtttcatcactcttattggcaacaaaatggagcatacagaaaaaagtaaaaggctacaggattgaactttcaaaagctttcactggaaagtaggcagtacctccctcttgtagagcccatgcatgagtggtagtataaattctgaagttttgattgcaacttgtcatgcaggaccccagctacctgtatgacccaaccaatgagactgctggagcatttgtgccagcccaaatactttatgatgcattccatggacggtatcacaatgctactggagcaatcatcttgctttttatcatatggggatctttcttctttggtggactttcaatcacgaccagtgcagctagagtggtaagtaaagtaacatggtttttcttacaaatttatagatggcatttggggaaaatgaacttgatattttgaccttccacctttaaaaggccttctcagttgtgtcagtaaatgtacaatttttgttggtaaattttctccttgcacttgaccagaccaatgtttccatctgcatggttcaggtatatgctctgtcaagagatgaagggattcctttttcatccatatggcgaaaagtccacccaaagcataaggttccttcaaatgcagtgtggctttgtgcagtcatctgcattcttcttgggctcccaatcttgaaagtcaatgtggtctttactgctataacttcaatatgtacaattggatgggtgggtggttatgcagttcccatctttgcaagaatggtgatggctgagaagaacttcaaaccagggccattttatttgggcaaagcaagaagaccagtttgcttgstagcctttctatggatttgttacacatgctgtgtcttccttttgcctactttttacccgattacttgggatactttcaattatgccccagtggcattaggtgtgggtttaggcctcataatgctttggtggatgttggatgcaaggaaatggtttaagggacctgtaaggaacattgatattcagaatgggaaggtt

SEQ ID NO: 4680 - DNA, 1584 bp, Ricinus communis
atggcttcttcaagggtgcatgctggctcatcacaaacagctttagagactgattctggagagaagcgtctcaatgaacttggataccagcaagaactccgaagagatatgacccttttcaagacccttgcaattacattctcgagcatggcagtatttactggaacacctctatatggtccaagcttgcgttatgcaggacctgcaagtatgatatggggatggatcgttgtcactttcttcacttggtttgttggagtagccatgtctgaaatttgctcctctttccctaccacaggttcgctttacttttgggctgctcatttggctggacccagatgggggccatttgcatcttggtgctgtgcctggctcgagactattggtgtcatttcaggcattggtgctcaggcatattcagcttctcaggctctgcaaatgatcattcttttgtctactggaacaaacaatggtggaggctactttgcttcaaggagtgttttcttgtgtatgtatattggttttattatcatttgggcagtgctcaacactttcgctttagaagtcgttgcattccttgacattatctccatatggtggcaggtgattgggggtttagcagtggtaataatgcttccattggtagcaaggccgacacaacctgcttcttatgtgttcactcactttgaaacatcacctgaagctactggaatcagtagtattccttacgcagtaattatgtctgtactacttagcaactactgcctttacggttacgacactgcagcacatttaactgaggaaacaaaaggtgctgataaaacaggtcctattgccattctttctagcattggcatcatctctgtttttggatgggcttattacttagctctcactttcagtatcaaggatttgaactatctgtacaacgaaaacaatgagactggtggtgcattagtaccagcacagataatctatgatgcatttcatggaaggtatggaaactcagctggagcggtagttttcctctgcataatctggggatcattcttcttttgtggactttcagtaactacgagtgctggcagagtggtttatgctttatcaagagataaaggagtcccatattcacctatctggagaaaaattcacccaaagtacaaggttccaagaaatgctgtatggctatgtgcagccattgggatcattcttggagtacccattttgaagcttgatgtagttttcacagcaatcatatcagtaagtacaattggatgggttggagggtatgctgtaccaatatttgcaaggctaatcatggatgagagcaacttcaagcctggaccattttatttgggcagagcaagtaggcccatttgcttagtggccttcttgtggatatgttacacctgttcagcttttctattgccaacagtttaccctatccaatggaaaactttcaactatgcaccggttgctcttggggtttgtttgacattgataatgctttggtgggtattggatgcaaggaaatggttcaagggtcctgtaagaaatattgatctgcggaatggagatgcttaa

SEQ ID NO: 4681 - DNA, 2078 bp, Vitis vinifera
cttggttttagctttcagacttttcggccttaattttcctcggccctctgtcatccaccacagactatctctggccaaatcaacagaaacatagtctgttttcatgaatattgaaggataagagtggtggctatgaaagggaaattattcaaactcgagttgtctattactttttgggctaacagaaattcaaacattaccgcatgctttacactgctgaccgttacttggacttgcacatgtagacaaaagaaacatgccacaggttgcaatagaaagtcaaagaggccacagatattctccttattatatgacaacctcgcttacactccaccatctttcttttactaattcatcttcctcctcagttcctttttgtttcagattcatccattcattgtttgactaaatatgaagacttaatcaaaatcaccattctcatataaagagcctggagtgttcttgttgctgttgctctttcaatcctccatcaacaaactgtggtagccatgaaggttttcaatgcggagtcgggtgccctggagatggattctggagaaaagcggctcaatgagcttggatacaagcaagaactcagaagagagatgactctgtttaagaccctggcaattacattctcgagcatggcggttttcacagggacacctctttatggttcatgtctgcgatatgcaggccctgcaagcttaatatggggatgggttgtggtcacatttttcacatggtttgttggaattgccatggctgaaatatgctcctctttcccaacaactggttccctctacttctgggctgcccatttggccggacccagatgggggccattcgcgtcgtggtgctgtgcatggctcgaggccataggcctcatttcaggaattggcgctcaggcattttcaggatctcaggcactgcaatttatcattcttttggccactggaaataacaaggggggaggctactttgcttccaagggcgtattcttaggcatgtatgtgggcctcaccatcatttgggcagttctcaacacgtttgcactacaagtcgttgcattccttagcataatttccatatggtggcagatccttggtggcctggttgtgattataatgcttccactggtggcgcggccgacacaatcagcctcttacgtgttcactcattttgaaaccgcacctgaatcaacaggaatatctagcaagccttatgctgtaattttatcggtactcctgagcaactactgtttatatggctacgacactgctgctcatctaaccgaggaaacgaagggtgctgatagaactggccccattgcaattctttctagtattgggatcatctcattcttcggatgggcttacaacttagctctcaccttcagcatccaggatccaaactacttatacgacccaaacaatgagacaggtgggggccttgtaccagcacagataatttacgatgcattccaccggagatatcagagtgccaccggagctgtagttttcatgtgcatcatctggggatccttcttcttttgtgggctttccgtcacagctagtgctgccagggttgtttatgctctatctcgagataaaggaattccattttcaccaatttggcgaaaaattcatcccaagtacaaggttccaaggaatgcagtgtggctctgtgcggtcatcggcatgcttctcgggctgcccatcttgaaactggacgtaatcttcactgccataatttcaataagcaccattgggtgggtcggtggctatgcggtccctatatttgcgaggctggtcatggctgagaagaattttaaaccaggacccttttatctagggagagcaagaaggccagtctgcttagtagccttcctgtggatatgttatacctgttcagccttcttgttgccaactgtctaccctatcacatgggacactttcaactatgcgccagtggctcttggcctggttctctcactggtcatgctatggtgggttttggatgcaaggaagtggttcaaggggccggttcgaaatattgatgtaaacaatggcatttaa

SEQ ID NO: 4682 - DNA, 1765 bp, Sorghum bicolor
tcaccctttaggcccaaatcaaacgcgccctctccccgggctcgcacccgccgccgccattcacgctcgcaggagccgccgccgccgctcacgctccaggctgcgagcccactgccgctcgcgagctcctcgtcccaggtcccatctgccatctgccgtcccgatcgagcgacagcgaggcttcggtggccggcggccggcgcgcaatctgcgggtcttcgtcgaccgtcgtcgtctccctcctctcggccgccggtgcgatgaggcggctgctcgcccacctacacccccatgcccagagcctcctcgctccgctgcctagcaaaccctccatcgccaccaagctccccttcctccttccccgccgcctcctttccgatgccggctcgcctcctgccccctcgcttccgtctccttccccgcccgctaccgacgtcacgaacacagagctgaagaagaggttggagacttactatggggtggatgaagaggcagagttaccatctgtcgctgaggctgtccttgagcggaatctcacgggtgcccatagtgagactgatgatgaccttattgaggagctgcgtagaaagccacttcctgaagtcggtgaccaagactttgagtctgattttgaggagatgcacgataccgacgaggagctgagtgacctctacaatgcgagggagcatgttgagaagaagatcaagaacaatgagttgtttaacatggatgataccaagtgggatgcctggatgaaggaggccacagacaagggctgcttccctaacatgaaggtgtgcgagggaatcctcgaggacatgctctactgggacaagttactacctgatgagatcaaacaaaaggtggaggccaaatttaatgagttgggagacatgtgtgagaggggagagatggaacctgagaaggcgtatgagttgttcaaagaatttgaggacaagatggttgccgagtgcactgaactaatcgaagcagagacgccaactgatgctgatgaactgactgaatcaggaagtaagaaagttgagttagatgatctacctggcgagggacctgttctaaggtgggaatcacggattgtgtttgctcctagtggcgatgcatatcatcccaaaaacagaaaagtcaaactcagtgtaactgtgaaggaactgggactttcacgacatgctttccgtcggttgcgtgatgttgttggaaagaggtataattctgggaaagatgagctcacaataatcagtgaaaggtttgaacatcgggaagagaacagaaaagactgcttgaggacactgtatactctaataatagatgcaataaaagctgacaaacttgttgaggatgccaggaatgcttatgttaaaggaagacttaaggctaatcctcaatttatggaacgattgaagaggaagacagagaaattgatggcagctgcataaggggtattcttagtcatactatatgttgatcatctagaataacaatgtcaacatacatctgcactctatgcctttttggagaccttttgctgtttcctaaattgaagatcgaagatgcttactttcctcagtttgctcagagtagcaactactactcacatggtattttggtattaataagccgctgttcatcgcatggtaccttttgtgtacgtcgaattctcatgaagtcacggattcatgtaggcaggactggtatcaaatcttaaccttctggtctgtacaatcgattcatttaaagggtaatttct

SEQ ID NO: 4683 - DNA, 1478 bp, Zea mays
gtgggtctccgtcgtcgtctctctcctcccggccgccggcgcgatgaggcggttgctcggccacctacacccccatgcccagagcctcttcgcttccctgcctcgcaaaccgtccatcgccaccaagctccccttcctcctctcccgccgcctcctttccgatgccgcctcgcctcctgccccctcgctgccgcctcctcccccgccctctgccgacgtcacgaacacagagttgaagaagaggttggagacttactatggggtggatgaagaggctgaattaccatctgtcgctaaggctgttcttgagcggaatctcacgggtgcccatagtgagactgatgatgaccttattgaggagctgcgtagtaagccactccctgaagtccatgaccgggactttgagtctgattttgaggagatgcatgatactgatgaggagctgaatgacctgtacaatacaagggagtatgttgagaagaagatcaagagtgatgagttctttaacatggatgacacaaagtgggatgccatgatcaaggaggccacagacaagggtcacttaactaacatgaaggagtgcgaggaaatcctcgaggacatgctctactgggacaagctacttcctgatgagatcaagcaaaaggtggagaccaaatttaatgagttgggagacatgtgtgagaggggagagatggaacctgagcaagcatatgagatgttcaaagaatttgaggataagatggtcgctgagtgcactgaattaattgaatcaaagatgccaactgacgctgatgaactgactgaatcaggaggtaagaaagttgagttagatgatctacctggcgagggacctgttctaaggtgggaatcacggattgtatttgttcctagtggagatgcatatcatcccaaaaacagaaaagtcaagctcagtgtgactgtgaaggaattgggactttcacgacatgctttccgtcggttgcgtgaggttgttggaaagaggtataattctgggaaagatgagctcacaataatcagtgaaaggtttgaacaccgggaagagaacagaaaagactgcttgaggacactgtatactctaataaaagacgcaatgaaagctgacaaacttgttgaggatgccaggaattcttatgttaaaggaagacttaaggctaatccacaatttatggagcgattgaagaggaagacagataagttgatggcagctgcataaggtgttacagagctccttgttttaacagctcctctctttccctcatcaacatggtgattattctgtattttcaattttattgttggctgtcgcacggggagaataatatgttgtatgcacttagctttgccttctttaatgtcttggcttcttttgtagggtcattcttagtcataaatatatgttgagcatctcgaataacaatgtcaacacacatccccagctaaaaaaaaaaaaaaaa

SEQ ID NO: 4684 - DNA, 1517 bp, Oryza sativa Japonica Group
ggtaaccctaaacccccttcctctcttccggcgcctgggcgctcttcccccctcttccccgccgcaatgaggcgcttggtgacgcacctccaccgcctctcccaccgcgccatcccttccccgcctccatctcgacccccaaccaccactagcctccccttcctcctctcccgccgcctcctctccgacgacgccgcgcctccgcccgccgccgacgtcccaaacaaagagctgaagcggcggttggaaacttactatggggtggacgatgaggcagaactaccatctgtcacagaggctgttcttgagcggaagcttgcggatgtgcacagcgagacggacgatgaacttatcgaggagctgcgcagcaaaccactccctgaggttcgtgacagggattttgagtccgactttgaggagatgcacgatactgatgaggagctggacaacttgtacaacgccagacagtatgtggagaaaaagatcaagagtgacgagttctttaatatggatgacgacaagtggaataagatgatcaagaaggctgtggataatggccacctcggtaatatgaacgaatgtgagaatattttggaggacatgctccactgggacaaactattacctgatgaaattaaaaagaaggtggaggccaaatttaatgagttgggggacatgtgtgagaagggagagcttgaacctgagcaggcttatgaattattcaaagagtttgaggataagatggtttcagagtgcacagaactaatggaagctgagaacccaactgacgtggatgaattttctaaaatggaaaataagagtgttaagttggacgatccacctggtgagggacctgttctaaggtgggagtcacgtattgtctttgctcctggaggtgatgcatggcatcccaaaaacaggaaagttaaactcagtgtgactgtcaaagagctgggactttcacgacatgccttccgacgtttacgtgaggttgttgggaataggtacaattctggaaaagatgaactcacaataactagtgaaaggtttgagcatcgggaagagaacaggaaagattgcttgaggacattgtatgctgtagtagaagatgcaaacaaggccaataagttggctgatgatgctagaaatgcatatgttaaaaacagacttaaggccaatgctcaattcatggaaaggttgaaggtgaagacacagaaattgagggtagctgcataaggggctcctggagctacacgctctggaacaattcctctttcatgatatcagtacggtcattttgcaacaaaggatgcggcagtgagacgtagaacgggagcaaaaatgttttgttgtaatttacatgtgttgccttgtttggacggcctgttaggtttatctttagctgaagctacactttttgaatttaccgtgaccgagcaggcctgtttacatgatcgcatagtgaactggctgtatcctgatcttctctacaaataacaaattgcttctgaaaactc

SEQ ID NO: 4685 - DNA, 1655 bp, Hordeum vulgare subsp. vulgare
gcaggaaaaaaaaaagggacactccgcgagtgacctagctctcggcccatcccctctctattccccgccgccgcaccattgctccgcctccgccacctaaatctccggcggccgccgaagctccagtgaccgtcctcttcaccatcttccggccgccgctatgaggcgctttctcacccatctccaccaccactcccaccgcctccgcccatccccacccctgtcttgtatccccacaaccaagaacaacctccctttccttgtctcccgtcgcctcctctccgacgatgcctctcccccggctgccgctccgttgcctccccctccccctcccccggctgccgcgccaccgcctccccctccgccgtccgccatcgacgtcccaaacgaagagttgaggcggaggttggaaacttactataaggtggaggatgaggtggagctatcgactgtcgctgtggctgttctcgagcggaagcttgcagatgcacacagtgagaccgatgatgaacttatcgaggagctgcgcaacaggccgcttcctcaggtccatgatcgggactttgaggctgactttgacgagatgcatgacactgatgaggagctcactgacctgtacaacgcgaggcagtatgttgagaaaaagatgaaggacgatgagtcatttaacatgaatgataccaagtgggacgaggagatcaagaaagcaacagagaagggccagctgagtaacatgaaggagtgcgaggatatcctcgaggacatgctccactgggacaagctactacccgatgagataaagcaaaaggtggaggccaaatttaacgagttgggggacatgtgtgagaggggggagcttgaacctgagcaggcttatgagctatttaaagagtttgaggataaaatggtctcggagtgcacagaactgatggaagcagagccgctgactgtagatgaactttctggggcagataataagagcgttgagttgaatgatccacctggcgagggacctgttctaaggtgggagtcacgtattgtctttgctcctggtggcgatgcatggcatcccaaaaataggaaagtgaaactcagtgtaaccgtcaaggaactgggactttcacggcatgccttccgtcgattacgtgaggttgttggaaagaggtataattcaggaaaagatgagctcacaataatcagtgaaaggtttgatcatcgagaagagaacagaaaagattgcatgagaacactgtatgctctagtcgaagatgcgatgaaagccgacgtgttggccaatgctgctagagatgcttatgttaaagggcggctccaggctaattctcatttcatggaccggctgaagatgaagacacaaaaattaaggcaagctgcataagctgcggtatggagcttccagttggaacatttcatctcccttgttatcaagtatcggggccatcctgctcaatatttgtacggctatctgcaaatacatggataaggagaaagatgtgtccttctgcacttcattttgctgcccttctttgcactattttgtaggtttactgtatattttgctccttccaaaggaaattatattttatattctgaacataccatgcccgtgcaaaccactttgcacaaacgattagtgc

SEQ ID NO: 4686 - DNA, 2191 bp, Sorghum bicolor
tattgttcttggaacttaaccagaatttactgttgctactgttatactaccttcaaaagctaatttcgctttcatatgtatagcatgacatcttctacaaacaacatggtttggacatgaggaactacatattttcaatcaaaaagcgtgtatccatggattatatctcatcacctgaactgggcttcctcaaaaatatatctggaagagttggtcgcaaaacaaagcttgtgtttagatttcttgataaagccctcttagatcattctataaaccaaacatatggttcactgtcgagtaacctaacgtttattaagtctattgcatctggcataatagtccctaagagttacatttggccggtgacaaaggataactatctactgccatccacatcaattgtcacagaagcccacaatgcagggctggaaatatatgcctctgattttgccaatgatagaattattccctataactacagctatgatccgttggcagaatacctcaactttgtcaatgatggtggcttctctgttgatggtgtattgtcagagcacccaattactgcatcagaggcaattggttgttttactaaactgaattcaaataagactgatcatggagaacccttagttatctcacataatggtgctagtggagactacccggactgtacagacctggcctaccatagtgcaattgataatggtgcagatatcattgattgtcctgttcaagtgacaagtgatggagttcttatgtgcatgagttccggtaacctgcttgacaccacgaatgttcagacaacaacttacagctctctggtttctgttgttccaaaaattcagcctcaaccaggaatcttcacattcaacctcacttgggccgacatgaacagcaatgctttaaaacccaaaatatcttctccagcaagtggttattctcttgtaaggaacccaaggtacacaaatcaagggaagtttttgaagttatctgactttctagcaatcgcaatggataaggacttgtcgggtgtcatgatcatcattgagaatgctgcatttttaataaattcattgggaatcgacattgttgattctgtaaccactgccttaagtgctgctggcttcaataatcatcctaccaaggaagttctgatccagtcaaaagatagtgctgttcttgtcaaattgaagcaaaagaaaacaaaatccaagcttgtttacactctaccctcaggcatcggggatgcttctaattcctcactgaaagacattaagaagtttgctgaagctgtggttgtggacagcaaatctgtttttactctaagttctgactttatcataagacagaacagtcttgtgcaagatctgcagtcagcagggctagctttgtatgcagaggtgttccggaatgagtttgtagcacaaccgttggatttcttcggagatgaaactgtagaaatcaattactatgttcaatcatttaatttatcaggcatcataactgatttcccgaagacagtcagaagatacaaaaaaaacacttgtacagttctgggaaatgatatgcccaactacatgcagcctcctcaggctggctcccttgcacagtttctccaaaccttcaaaacccagccaccatctctgccacctatgccgacactgagttcttcaagcgtggaggagccacctcttcctactgttgcctcaagaagtgtatctgatggtagttcatcagggggcaccagaactcctggcacaccttctgatgctcacacggctactatgagtgctggcatgctacttgtgatggttttcacagctctgctgatctgacaagacacatgagactgtatagtagacgactgaagctaatctatcacccttcgattcgggcaagctttgactggtgatctgtagcagcagaagcggcactggggagtgagagactaaggaagcttggggatctggagagggaagggccggcggggtgaggcagcttctcaaaatagtcccacagccccaccaacagcagcaggcccagcaacactaagaaatagtatatgcctatacctgcttgcggtttgtggctttatgttatatttgttgttatatatgtatgagacatgatacattttggacacttgatcaaattctgaatcgaactctatatcatcattagccgcaag

SEQ ID NO: 4687 - DNA, 2745 bp, Zea mays
acctcctcgtcgtcgtcttggccgcagcagccagcaggtcgcggccatggcctccgtctccctcctactctgcctcctcctccttgtgccacctctcgccgccgcccagcagcagatgtcctctttctccgcaaacaactcgacctggagccccacgaacagcaaccgcatcctcgtgtcgatcaatcgggaattcgccgccgggttcgtggcgtcgacctctgctcgggatcgctaccacttcgccgtctgggtcgtcggctccaactccaccgacaaggctttcatatggtacgcccacgacacagccagctactccccctacgagggcaacgacacctccaagctcgccatcgacgcggcgggccggctcacctggactgccggcgggaacaacaacgccaccatctggtcgctcccgccccccgccaacaccaccaccaccccggcggtgctgcagctcaacgatacggggagcctggtctacggggcagcctggtcgagcttcgccgagcccaccaacacgctcatgccggggcaggccatgcccaagggaggcaacgacaccacgctccagtccgtcaacggccactacagggtcgtcaactccgccacgctgcagttcaacaattccatgatgtacgccaacatcagcggcggcagcgctctgctcaatctcaccgccgacggcaagctccagttcagcggctcgcagctcatcgcctccgaccaaggcaccaccaatcgggtgcggcggctcacgcttgacgacgacggcaacctgcgcctctacagcctggtgcccaagacccggaagtggctcgtggtgtggcaggtcgtgcaggagctctgcaccatccggggcacctgcgccaacggcagaatctgcgtccccgtcggcgttgacagcaccacttgcgtctgcccgccgggctaccgcaacgccaccccgacggacccctgcacacccaagaaaaggtacagcggcaggggcgacgacgacacgttcgtgcggatggacttcgtctccttctccggggccgccaactcctcggcgtcggaccccgggccgctgatgaccaagctgacgccgcagaacctggcggactgcgagagactctgccggagtaactccacctgcgtggcgttcgggtacaagttcggcggcgaccggacgtgcctccagttcaccgggctggtggacgggtactggtccccggcgacggagatgtcgacctacctgcgggtggtggcgtcggacaaggacagcaacccgttcacggggatgacgaccatgatcgagacggtgtgccccgtgcggctgtcgctgccggtgccgccgaaggagtcgcggacgacgatccagaacgtggccatcatcacggcgctgttcgtggtggagctgctggccggggtgctgtcgttctgggcgtttctgcgcaagtactcccagtaccgggagatggcgcgcacgctggggctggagtacctccccgccggcgggccccggcggttctcgcacgcggagctgaagcaggcgaccaaggacttctccaacgtggtggggcgcggtgcgtacgggacggtgtaccgcggcgagctgcccgaccggcgcgccgtggcggtgaagcagctgcaaggcgtgggcggcggcgaggcagagttctgggcggaggtgaccatcatcgcgcgaatgcaccacctcaacctggtgcgcatgtgggggttctgcgccgaaaaggagcagcggatgctggtgtacgagtacgtacccaacgggtcgctggacaagtacctgttcgccggcggaggcggaggcggtgggagcggcgaggaggattcgtcctctgagcagcagcagcagcagccgctgctggaccttcacacccgttaccgcatcgcgctgggtgttgcccgcgccatcgcctacctccacgaggagtgcctggagtgggttctccactgcgacatcaagcccgagaacatcctgctggaggacgacttctgccccaaggtgtccgacttcggtctgtccaagctgacgagcaagaaggagaaggtgaccatgtcgcgcatccgcggcacccgcgggtacatggcgcccgagtgggtgatccaccgcgagcccatcacggccaaggccgacgtgtacagcttcggcatggtcctgctggagatcgtgtccggtcgccgcaactacgggttccggcaggagtcggtgggcagtgaggactggtacttccccaagtgggcgtacgagaaggtgtacgtggagcgccgcatcgacgacatcctggacccccgcatcgccgccacctacgacgacgccgccagcgtcgccaccgtggagcgcatggtgaagacggccatgtggtgcctgcaggaccgcgccgagatgcggccgtctatggggaaagtgtccaagatgctggaggggtccgtcgagatcacggagcccgtcaagccaacaatcttctgcgttcaggacgactgatgactacacaagttttttttctttcatttccagatgtgaattcccagtgccgtctgccgtccaccgtcaatagaattttagtagctgttcacttccactctttgtttttttttttggtttgcatagcaaaagctatactaatccttaagtattgtgaatccaccgtccaggaatccgctaagttattgttcacatagtccaccttgcacccattaccaaatttgtttctaggccataaaaaaaaaaaaaaa

SEQ ID NO: 4688 - DNA, 2810 bp, Oryza sativa Japonica Group
aattcccttccccaatccagcaagcacaaccatggcggccgctgtcctcctcctcctcctcctaccggccctcgccgccgcccaggcccaggcccagcagatgcggaccttctccgccaacgacaccaattggagccccgccgagagcaaccgcaccctcgtctccaacaacggggacttcgccgccggattccggccctccccctcctccccagccaagttctggttcgccgtctgggtgagcgccaacgccaacgagtccaggccggtcgtcatatggtacgcccacaacgacgaccactccgccgtggagggcgacgccaattccgtgctctccatcgacgcggcggggaagctgtcgtggagcgacaacggcaacagcaccaccctttggtcccgcaacttcaactccacgagtgcccctttgtctctgaacgactcggggagcctcgaccacggcgcctggtccagcttcggggagccgacggacacgctgatggcgtcgcaggccatccccagcattagcaacggcaccaccaccaccaccagcatcaccctgcagtcccagaacggcagattccagctgttcaacgccctcaccctgcagcacggctcctccgcctacgccaacatcaccggcaacaccgccctgcgcaacctcaccgccgacggcacgctgcaactcgctggtggcaatccctcccagctcatcgcctccgaccagggctccactcgccgcctgcgccgcctcaccctcgacgacgacggcaacctgcgcctctacagcctgcagtccaagaaagggcagtggcgggtggtatggcagctggtgcaggagctctgcaccatccggggcgcctgccaaggggaggccaacatctgcgtcccccaaggcgccgacaacaccacctgcgtctgcccgccggggtaccgcccgcagggcctgggctgcgcccccaagcttaactacagcggcaagggcaacgacgacaagttcgtgcggatggatttcgtttccttctccggtggcgccgacaccggagtgtccgtccccggcaagtacatgaccagcctgacgccgcagaacctggcggactgccagagcaagtgccgggccaacgcctcttgcgtggccttcggctacaagttgggcggggaccggacgtgcctgcactacacgcggctggtggacggctattggtcgccggcgacggagatgtcgacctacctgcgggtggtggagtcgaacaacgacccgaacaacttcacggggatgacgacgatgatcgacacggtgtgcccggtgcggctggcgctgccggtgccgccgaagcaggggcggacgacgatccggaacatcgccatcatcacggcgctgttcgcggtggagctgctggcgggggtgctgtcgttctgggcgttcctgcgcaagtactcgcagtacagggagatggcgcggacgctggggctggagtacctccccgccggcgggccgcggcggttctcgtacgcggagctgaaggcggcgaccaaggagttctcggacttggtggggcgcggggcgtacgggaaggtgtaccgcggggagctgccggaccggcgggcggtggcagtgaagcagctggacggggtgggcgggggagaggcggagttctgggcggaggtgaccatcatcgcgcggatgcaccacctcaacctggtgcggatgtgggggttctgcgcggacaaggagcagaggatgctggtgtacgagtatgtgccaaacggatcgctggacaagtacctgttcgctccaggcaccggcacccaaggagacgaagaagagagcaacaagcggcctctgcttgacctgcacacccgctaccgcatcgctctgggcgtggcgcgcgccatcgcgtaccttcacgaggagtgcctcgagtgggttctgcactgcgacatcaagcctgagaacatccttctggaggacgacttctgccccaaggtgtccgacttcgggctgtccaagctcaccagcaagaaggagaaggtgaccatgtcccgcatccgtggcacccgcgggtacatggcccccgagtgggtcatccaccgcgagcccatcaccgccaaggccgacgtctacagcttcggcatggttctgcttgagatcgtctccggccgccgcaactacggcttccgccaggactccgtcggcagcgaggactggtacttccccaagtgggccttcgagaaggtctacgtcgagcgccgcatcgacgacatcatcgaccctcgcatcgtccaggccgaggcctacgacgacgaccccgccagcctcgccaccgtcgagcgcatggtcaagacggccatgtggtgccttcaggaccgcgccgacatgaggccctccatgggcaaggtcgccaagatgctcgagggcaccgtcgagatcaccgagcccgtcaagcccaccatcttctgcgtccaggacgactgatctctcctaggagtactccacttcttgccacgagagacacacaaattatctttcttatttattatactagtactagttcagatcagatcagagcagagcactgcatatcctgcgttgtctgatttgcctgctgggctcacgacagcaactgagcaaggcaaatgtacatgatgagtggattacgcttcaaaatgatacgcaccatcaaattcgtcggcatctctctcgtaggctcagcgcagatatcatgacatatatttaccttttttttattagtaaatttcataaaactacatatactttgactaaattatcataaaactacatatttaaggtc

SEQ ID NO: 4689 - DNA, 2730 bp, Hordeum vulgare subsp. vulgare
gtaagtagtagtactcgacttccaccagattcatccatccattccagccgcagtcggtcggcaggcaggcaccgatcgaatccccaattccccatggccatggcgctcctccgtctccgtctcctcccctgcctcctcctcctggctctcgccggcgcccaggctcagcagatgacctccttccccgccggcaacgacaccaggccctggctcccgacggaggccagccgcgtcctcgtctcgccgagccgcggcatggccgccggcttcgtggcgacggagggctcgtccccgcgcaagtaccgcttcgccgtctgggtcgccaacgtctcctcccgcgcaggccccgccggcaagaccatcatatggtacgcgcacggcgactccgacggcgtcgccctcgaggccgacggcagctcctccctcctcgtcaacgccgccggggcgctcacctgggccggggccagcagcaccaacgccaccatctggtccccgaccaacgccggcaacgccacggctcctaggctgacgctcaacgacacggggagcctcgtgttcggctcctggtctagcttcgaccatcccactgacacgctcatgccggggcaggccataccccaggcagccaacaccagcgccggcggcgttaccacgctgcagtctgccagcggacgctaccggctcgtcaactccaaggcgctcaagtactactcgggcccctcgggctccatctacgccaacatgaccggcggcggcgcgctgctcaacctctccaccgacggcgagctgatgctcggcggcggggacacgaatccgctcatcgcctccgacaagggcgctaaaggccggctgcggcgcctcacgctcgacgacgacggcaacctgcgcctctacagcctgttcccgccgagacgcgagtggcgcgtcgtgtgggagctcgtgcaggagctctgcaccatccagggcacctgccccggcaacaacaccatctgcgtccccaagggcgccgacggcgtcacctgcgtctgcccgcccggcttccgcaacaggaccggcgggggcggctgcgaggccaagaagagcgtgggcaccggcggcaagttcgtccggttggacttcgtgtccttctccggcggcgcggccgccaagtcctccgaccccggcccgttcatggccatccagccgcccagtaacctgaaggtctgcgagaatatgtgccgggacgaccccagctgcccggcgttcggctacaagttcggcggcgaccggacgtgccgcctgtacaagacgcggctggtggacgggtactggtcgccgggtacggagatgtcgaccttcgtgcgggtggcggagacggacaacgacacgaacccgttcacggggatgacgacgatgatcgacacggtgtgccccgtgcagctggcgctgccggtgccgccgaagcagaaggcgacgaccatccgcaacatcgccatcatcacgacgctgttcgcggtggagctgctggcgggggtgctgtccttctgggccttcctgcgcaagtactcgcagtaccgcgagatggcgcgcacgctggggctggagtacctccccgccggcgggccccggcggttctcgtacgcggagctcaagacggcgaccaaggacttcacggacgaggtggggcacggcgcgtacggcacggtgttccgcggcgagctccccgaccggcgggcggtggcggtgaagcagctgagcggcgtgggcggcggcgaggcggagttctgggcggaggtgaccatcatcgcgcggatgcaccacctgaacctggtgcgcatgtgggggttctgcgcggacaaggacaagcgcatgctggtgtacgagtacgtgcccaacgggtcgctcgacaagtacctcttctcgagctcctcctcggcggcgccgtccggcggcagcggcggcgaccaaggagagcagagctcggagcaagggcagcagcagaaggtgatgctggacctgcacacccgttaccggatcgcgctgggggtggcgcgggcgatcgcgtacctgcacgaggagtgcctggagtgggtgctgcactgcgacatcaagccggagaacatcctgctggaggacgacttctgccccaaggtgtccgacttcgggctgtccaagctgacgagcaagaaggagaaggtgaccatgtcgaggatccggggcacgcgcggctacatggcgccggagtgggtgatccaccgggagcccatcacggccaaggccgacgtgtacagcttcggcatggtgctgctggagatcgtgtccgggcggcgcaactacgggttccggcaggagtcggtgggcagcgaggactggtacttccccaagtgggcgtacgagaaggtgtacgtggagcggcgcatcgaggacatcatggacccccgcatcctcctcaccgtcgacgacgacgccgacagcgtcgccaccgtcgagcgcatggtcaagacggccatgtggtgcctccaggaccgcgccgacatgcgcccctccatgggcaaggtcgccaagatgctcgagggcaccgtcgagatcaccgacccagtcaagcctaccatcttctgcgtgcaggacgactagccttccctccttactttcattatatttagtcacgctactagtcgtagtattatactgttaaaacaaagccaaattgttagttacgtgcataataatataatatccgagattcaatac

SEQ ID NO: 4690 - DNA, 3140 bp, Hordeum vulgare subsp. vulgare
gggtgattagcgctagaacctagaagtagtagtactcgacttccaccagattcatccatccattccagccgcagtcggtcggcaggcaggcaccgatcgaatccccaattccccatggccatggcgctcctccgtctccgtctcctcccctgcctcctcctcctggctctcgccggcgcccaggctcagcagatgacctccttccccgccggcaacgacaccaggccctggctcccgacggaggccagccgcgtcctcgtctcgccgagccgcggcatggccgccggcttcgtggcgacggagggctcgtccccgcgcaagtaccgcttcgccgtctgggtcgccaacgtctcctcccgcgcaggccccgccggcaagaccatcatatggtacgcgcacggcgactccgacggcgtcgccctcgaggccgacggcagctcctccctcctcgtcaacgccgccggggcgctcacctgggccggggccagcagcaccaacgccaccatctggtccccgaccaacgccggcaacgccacggctcctaggctgacgctcaacgacacggggagcctcgtgttcggctcctggtctagcttcgaccatcccactgacacgctcatgccggggcaggccataccccaggcagccaacaccagcgccggcggcgttaccacgctgcagtctgccagcggacgctaccggctcgtcaactccaaggcgctcaagtactactcgggcccctcgggctccatctacgccaacatgaccggcggcggcgcgctgctcaacctctccaccgacggcgagctgatgctcggcggcggggacacgaatccgctcatcgcctccgacaagggcgctaaaggccggctgcggcgcctcacgctcgacgacgacggcaacctgcgcctctacagcctgttcccgccgagacgcgagtggcgcgtcgtgtgggagctcgtgcaggagctctgcaccatccagggcacctgccccggcaacaacaccatctgcgtccccaagggcgccgacggcgtcacctgcgtctgcccgcccggcttccgcaacaggaccggcgggggcggctgcgaggccaagaagagcgtgggcaccggcggcaagttcgtccggttggacttcgtgtccttctccggcggcgcggccgccaagtcctccgaccccggcccgttcatggccatccagccgcccagtaacctgaaggtctgcgagaatatgtgccgggacgaccccagctgcccggcgttcggctacaagttcggcggcgaccggacgtgccgcctgtacaagacgcggctggtggacgggtactggtcgccgggtacggagatgtcgaccttcgtgcgggtggcggagacggacaacgacacgaacccgttcacgggggtgacgacgatgatcgacacggtgtgccccgtgcagctggcgctgccggtgccgccgaagcagaaggcgacgaccatccgcaacatcgccatcatcacgacgctgttcgcggtggagctgctggcgggggtgctgtccttctgggccttcctgcgcaagtactcgcagtaccgcgagatggcgcgcacgctggggctggagtacctccccgccggcgggccccggcggttctcgtacgcggagctcaagacggcgaccaaggacttcacggacgaggtggggcacggcgcgtacggcacggtgttccgcggcgagctccccgaccggcgggcggtggcggtgaagcagctgagcggcgtgggcggcggcgaggcggagttctgggcggaggtgaccatcatcgcgcggatgcaccacctgaacctggtgcgcatgtgggggttctgcgcggacaaggacaagcgcatgctggtgtacgagtacgtgcccaacgggtcgctcgacaagtacctcttctcgagctcctcctcggcggcgccgtccggcggcagcggcggcgaccaaggagagcagagctcggagcaagggcagcagcagaaggtgatgctggacctgcacacccgttaccggatcgcgctgggggtggcgcgggcgatcgcgtacctgcacgaggagtgcctggagtgggtgctgcactgcgacatcaagccggagaacatcctgctggaggacgacttctgccccaaggtgtccgacttcgggctgtccaagctgacgagcaagaaggagaaggtgaccatgtcgaggatccggggcacgcgcggctacatggcgccggagtgggtgatccaccgggagcccatcacggccaaggccgacgtgtacagcttcggcatggtgctgctggagatcgtgtccgggcggcgcaactacgggttccggcaggagtcggtgggcagcgaggactggtacttccccaagtgggcgtacgagaaggtgtacgtggagcggcgcatcgaggacatcatggacccccgcatcctcctcaccgtcgacgacgacgccgacagcgtcgccaccgtcgagcgcatggtcaagacggccatgtggtgcctccaggaccgcgccgacatgcgcccctccatgggcaaggtcgccaagatgctcgagggcaccgtcgagatcaccgacccagtcaagcctaccatcttctgcgtgcaggacgactagccttccctccttactttcattatatttagtcacgctactagtcgtagtattatactgttaaaacaaagccaaattgttagttacgtgcataataatataatatccgagattcaatacagttgactgattgtcgactactatatgaatgcatgcatgctgttggaaaagttcaaccacatgtttataaatggttaacgaaattatgaactatccgcgttgttgccgctgtgtttctccgtgatgagcagcgtctgaccacagcatgagcgcagaaaggagtgagatggtggctgtctcgacgcgtagcctgcatggaccgagacctacagggaccgcaccagccgccttcaaaaccttcacctcctcttccgtaaagtctggccaaacgtggaaaacaacaggaccgtgtgttcattcagttgttctggacctctggaaatttgctatcaccttactattgttcattgttatgtggttattttgcataacataaaaccattttgctc

SEQ ID NO: 4691 - DNA, 2129 bp, Zea mays
ccagcacacggtgacaaaaaggaaagctgcagcgagcattttcaggcaacagtggtaactattagtagtattattctctcatgcgatcaacatacatagtggctgtatggatggttaaccatggttgcctcttgaccgcactaccggcgtggcgtgacctaacctaacccgagctccctccctttcgcccccctgtctccctcgcccacgcacgccctttattaaggcacagaggacagcacacagtattgtgggaactgcatgctgagagcaaacccagaaaggaaaaaggaaaaaaagaaaacagagagaggggagagtgggagacggtcggagacagaggcctcactcctccacactctcagtcgtcttccagtcccagcgctttcttggatcgcgaggaaaccactcggggagtttgcagttgcagagaactgtatcggccgaagtggttgcacggtgtgttggccttggccatgcgccacggcagggaacagagacgagcagcagggaggcagcaatggaggcgctcattgaccctgctctcgctgtaaagatagtcccgcggtgccctccgaattccacttgatccaactctcgacatgaagcggccacgcggcgctactccctccctgtctgcgatgcccaatcatcaggaagatgacggctacggcgtgctcgggatggaggcggacgtggacgtggacgtggacgaggagatgatggcgttcggcggcggcggcggcggggagaagaagcggcgcctgagcgccgagcaggtgcgcgcgctggagcggagcttcgaggtggagaacaagctggagccggagcgcaaggcgcggctggcgcgcgacctcggcctgcagccccgccaggtcgccgtctggttccagaaccgccgcgcccgctggaagaccaagcagctggagcgcgactacgccgcgctgcgccgctcctacgacgcgcttcggctcgaccacgacgcgctccgccgcgacaaggacgccctcctcgccgagatcagggagctcaaggcgaagctgggggacgacgaggacgcagcggcgagcttcacgtcggtcaaggcggagccggcggcctcggacgggccggcccccgcgggggtggggtcgtccgagatcagtgactccagcgcggtgctgaacgacgcggacccgcccgtggcggaggcgccggcgccggcgcccgaggtgcagggcacccttcttgtcgcgccggctggccccgttgccggcgcagcggcggcgaaccatggcggggtgttcttccacgggagtttcctgaaggtggaggaggacgagacgggccttttagacgacgacgggccgtgcggcgggttcttcgccgtggagcagccgccggcgatggcgtggtggaacgagcccgcggaacactggaactgaaccgaggtggacgcggcagtgcagcgtagtagaatcgggatctcggacgagcggtggaggaataaccgaatagaggaattcggagcgataaagaaggggcttttctgcaaattttgtaaaacggggttttacctagccctactttttgtcaattctcgagcgtattagcagtagacagtagtagtagtctgggtcggaacccagtcaagctcagcgcctgggttgcgtttggactccagtgcagaattgcgtagaggatttagaggaagagcggagctgagctgagcgaggcaggagtaaaggacaacctgtatgtcactgttagtgggcccagtgccacgtgaaagtcaggcactgttggtgcccattgacggccggacttgccagcgacgcggatgggcgacgtgaacgtgtctggccgagcagtgcgctcgctccctccccccaatgggccatggcctcttccgcgaaagcgtgctcccctgtaagtatctgatttggatgctagccaaggctgctggatgattacttcgattatctaaaaaatctgatttggatgctcgccgctagatcgttggctcgctgcggagggaatcggcagcggtgccgtcagattgtggaatgtgttcaacggttatctgttggattaatgtgggcttggcccaaattaatattcaataatagtcaatgctaatggcccacttt

SEQ ID NO: 4692 - DNA, 1799 bp, Zea mays
gagagggggagagacacagaggcctcactccacacactgtcttgtctctcagtcccagagctttcttggatcgcgaggaatccactggaaattttgcaattgtagtagagaactgtatcgtccgacgaaggtgcatggtgttggccatgggtcacggcagggaacagagacgagcaggtcggcgctctccccccagctcattgatcctgtcctcgctataaggtagtcctgcggtggcctccgaatttcactcgatcgaacacgacatgaagcggccacgcggcgccagtccccctctggctgcgatgaccaatccgaacgatgatggttacggcgtggtcgggatggaggcggacgcagacgcggacgcggacgaggagatgatggcgtgcggcggcggcggggagaagaagcggcgcctgagctccgagcaggtgcgcgcgctggagcggagcttcgaggtggagaacaagctggagccggagcgcaaggcgcggctggcgcgcgacctcggcctgcagccgcgccaggtcgccgtctggttccagaaccgccgcgcccgctggaagaccaagcagctggagcgcgactactccgcgctccgccagtcctacgacgcgctgcggcacgaccacgacgcgctgcgccgcgacaaggacgccctcctcgccgagatcaaggagctcaaggcgaagctcggggacgaggaggcagcggcgagcttcacgtcggtcaaggcggagccggcggcctcggacgggcctccccccgtaggggtggggtcgtccgagagtgactccagcgcggtgctgaacgacgcggacccgcccgtggcggaggcgccggtgccggaggtacggggtactcttcttgacgcgcccggcgccgtggcggcgaaccatggcggcgtgttcttccacgggagtttcctgaaggtggaggaggacgagacggggctcctggacgacgatgagccctgcggcgggttcttctccgtggagcagccgccgccgatggcgtggtggaccgagcccacggaacactggaactgaaccgaggcggaggtagatgcagcgcagcgtagactcgggatctgggccgagcggtggaggaataaagaattcggagcgagaggcgggggcttttctgcaaattttgtaaaatggagttttacgtagccctctttcgtcaattctcgcgcgaatattttagcagtagcagtagtctttaggaacccagtcgagatcagtacctggttgcgtttggactcgaatgcaaaaaaaaatgcaagaaaaagagatgagaccaaacactgatgcagaaaggggagagagggacagtgggaagaggagtgtagaggaagagctgagcgaggtagggagtaaaggacaagctgtatgtcactgttagtgggcccagggccacgtgaaagtcaggcattgttggcgcccaattgaccgccggacttgtcagtgatgcggatcggcgacgtgaacgtgtctggccgtgcgctcccccaatggcctcttccgcggaagcgtggctctggctccttcgtcgacctgtcgtgcgtctctgtatctaattttggatgctcgccgacgccgctagatagctgtttggatgccgtgccgtgagaaatggcgatcgtttttgtgccctcttgctcgagcagatgcttgtccttgttataaaaaaaaaccctgcgaggtgttatataggctagtgtggggttctatctttttctccaataaatatgtagccctttataataactaatgaataaaagataacgcaag

SEQ ID NO: 4693 - DNA, 1847 bp, Sorghum bicolor
gaaagcaaaccgaaaaagaaacagagaagagagggagacagagtcctcactcccacactctcactcttgtcttccagtccctcccagcgcctttcttggatcgcgaggaaaccactcgggaaaattttgcaattgtagagaaccgtatcgaccgtcgacgagggtgcatggtgttggccatgggtcacggcagggaacagagacgagcagggaggcagcaatggaggcgctcgtccccccgctcattgatcctgctctcgctgtaagatagtcccgcggtgccctctctgaatttcactccatcgaactcgacatgaagcggccacgcggcggcagtccgtcctccctcgctgcgatgaccaatccggatggtgatggttacggcgtggtcgggatggaggcggcggacgcggacgccgacgcggacgaggagatgatggcgtgcggcggcggcggcggggagaagaagcggcgccttagcgccgagcaggtgcgcgcgctggagcggagcttcgaggtggagaacaagctggagccggagcgcaaggcgcggctggcgcgcgacctcggcctgcagccgcgccaggtcgccgtctggttccagaaccgccgcgcacgctggaagaccaagcagctggaacgcgactacgccgcgctccgccactcctacgacgcgctgcggcacgaccacgacgcgctccgccgcgacaaggacgcgctcctcgccgagatcaaggagctcaaggcgaagctgggggacgaggaggcggcggcgagcttcacgtcggtcaaggcggagccggcggcctcggacgggcctccccccgtcggggtggggtcgtccgagagtgactccagcgcggtgctgaacgacgcgggcccgcccgtgccggaggcgcagcctgtgccggaggtacagggcactcttcttgacgacgcgccgtgcgccgtcgtcgccggcgcctcggcggcggccgcgaaccatggcggggtgttcttccacgggagcttcctgaaggtggaggaggacgagacggggctcctggacgacgacgagccgtgcggcgggttcttcgccgtggagcagccgccgccgatggcgtggtggaccgagcccacggaacactggaactgatgaaccgaggccggcggatgatgatgccgtccgaccgcagcgtaggctcgggatctgggccgccgaggggtgggggaataaagaattcagagcgaaacacgggggctattctgcaaattttgtaaaatggagttgtacccgccctctttttgtcaattctcgcgcgttttagcagtactgtagtagtctaggaaccccagtcgagctcagtacaaccctggttgcgtttggactccagtgcaaaaatgcaaggaaaagctagacatgagaccaaaactgatgcagaggagagatagggacagtgagaagagtgtagaggaagagctgagcgaggtaggaaggacagtctgtacgtcactgttagtgggcccagggccacgtgaaagtcaggcattgttggcgccccattgaccgccggacttgtcagtgacgcggatcggcgacgtgaacgtgtctggcccgtgcgctccccccatgggctatatgggcccatggcctcttccgcgaaagcgtggctcctccgtcgacctgttgtgcacctctgtatctgattttttggaagctcaccgctggatcgctggcctctagcgccaactgagccgtggcccgtgagaaatggcgatcgcttatgtgctctcttgctcaaaagcaactggccgtgagatccttctcgtgtcctgttcgaccgagtagactttcactagatgatttt

SEQ ID NO: 4694 - DNA, 1473 bp, Oryza sativa Japonica Group
gaaaacagaaaggaaaccgagaaagagagagagagagagagaggtagggagggaagaagagtcactccacactccacactctcatcccctggtccctttcttggatcatgagaaaccgcgcaacaaaattgcaattctaggcagcatttggaccggggacttggctacgtggtgtttggccatggatcgcagcgtggaattaagaccggcgaggactcagcgacggaggcacccgcgtcattcctacgcttctgtgcccgtcgtcttctcgcagtgagagagagagagagatcgaccaggcgttcactgaattttactagaactcggcatgaagcgacccggcggtgccggcggcggcggaggcagcccatcgctcgtcacgatggctaattctagtgatgatggatatggaggggttgggatggaggcggagggggacgtggaggaggagatgatggcgtgcggcggcggcggggagaagaagcggcggctgagcgtggagcaggttcgcgcgctggagcggagcttcgaggtggagaacaagcttgagcctgagcggaaggcgcggctggcgcgcgacctcggcctgcagccgcgccaggtcgccgtctggttccagaaccgccgcgcgcggtggaagaccaagcagctcgagcgcgactacgccgcgctccgccattcctacgactccctgcgcctcgatcacgacgcgctccgccgcgacaaggacgccctcctcgccgagatcaaggagctgaaggcgaagctcggggacgaggaggcggcggcgagcttcacgtcggtgaaggaggagccggcggcctccgacgggccaccggcggcgggatttgggtcgtccgacagcgactcaagcgcggtgctgaacgacgtggacgcggccggcgccgcgcccgcggcgacggacgcgctggctccggaggcgtgcacgtttctcggcgcgccgcccgccgcgggcgcgggcgcgggcgcagcggcggcggcgagccacgaggaggtgttcttccacggcaatttcctcaaggtggaggaggacgagacggggttcctcgacgacgacgagccgtgcggcgggttcttcgccgacgatcagcccccgccgctgtcgtcgtggtgggccgagcccacggagcactggaactgaagcaaatccggcgtaaccgcagccgagagagagagttggaaaacactatgcctgggggaataaagaattctgcaggaaagcagggtcttatctgcaattttgtaaaaaaaatggacctctacgtacttctctagtctcttttgccaattctcgcgcacattagctgtagcactgcagtgtagtaaaatcctactactccattacctctccaatttctagctctcacttccctacttaaactcatctgagctctaatgtaagcatatgccatccaaaatggaccataaatatgtcactagcagtaggatggt

SEQ ID NO: 4695 - DNA, 1437 bp, Hordeum vulgare subsp. vulgare
ggttggggaaacagaaaggaaacccggaaaagaaatcagagcaggactccactccacactccactctcccccctccccctcactctttcttggatcgtaaggaaccgcggaggaaatccgtcctcgatcgtggcgggggcattttgatcggcgttggtttcccaaggcggagacgaggagggtacatggtggtcgtcatggatcgaggcgtggacgggaggacggggagggaccagcagtggaggcgcccgagcccttccgcactctctctgctcctcttctcgcagtaatcggggaaggtggtggtggctgtggtgccggtgccctctgaatttctgcggaactcgccatgaagcggcccggcggcggcaacccctcccccctccaccagatggccagtcccagtgatatggactacggcgtggtcgggatggaggctgatggggacgcggaggaggagatgatggcgtgcggcggcggcggcggcggctgcgggggaggggagaagaagcggcggctgagcgcggagcaggtgcgcgccctggagcggagcttcgaggtggagaacaagctggagccggagcgcaaggcgcggctggcgcgcgacctcggcctgcagccgcgccaggtcgccgtctggttccagaaccgccgggcgcgctggaagaccaagcagctcgagcgcgactacaacgcgctgcgccactcgtacgacgccctccgcctcgaccacgacgcgctccgccgcgacaaggaagccctcctcgccgagatcaaggatctgaaggggaagctgggggacgaggaggccgcggcgagcttcacgtcggtgaaggaggagccggcggcatccgacggcccgccgcccgcgggcatggggtcatccgacagcgactccagcggggtgctgaacgacacggacgcgacgggcgccacgccagcagaggaggcgccggctccggagatgggggagctgctcggcgggcccggcgcggcggtggcggggcacgggcagatgttcctgcaggggaatttcctcaaggtggaggaggacgagacggggttcctggacgacgaggagccgtgcgggggcttcttcgccgacgagccgccgctggcgtggtggaccgagcccgcggatccctggaaatgaggcgcggcagagagagagagactactactcgtactcggtgggagacgacacctcgcgcggggaataaaagattagtgaagaaagcaggggcttttctgaaatttttgtaaatctcgtttttatcccgtccttttctgtcaaaccctcgccatcgctaggcagccatcagcaatagtactactactactactagtgccatttccgcccctgctcttctacctatttccttttccttcccataaaccccttgcctcctagctaaaaacttaagctaagccggactg

SEQ ID NO: 4696 - DNA, 1518 bp, Sorghum bicolor
cggagcatgcacggagccagcatttggtggtgattcgccgctcttctcttcttccatttccatcagcaagcctccctcctctgtccaccctgtccccagcttatccaggaaggcacagccaagccaagaacgcatcgtcactcgccagcaacaaaggagcgagcacgccgagcagaggaggacttgttttttctctaccagtcgcggacactcctcccagtctcccacagctcgaaatgttcaggggttgcggcctgttcgcgtgcgcccgccggggccgcggcgaccacctcaggaagcgcggtgagctaggcggcgcgagctcgcgtgttgcgccggccgagccggagccggtgtgcgtggactacgaggccgaggcagaggacagcagcggcggcgccgcgcccgcgcggcagctggcgtgggcggaggtggagaccgccacgggcgggttctcgtccaaggtggtcggccgcggcgggttcagcaccgtgtacctcgcctcgctctcctcgtcgcggctcggcgccgtcaaggtccactgcagcagcgagcgcctccaccgcgcgttccgccgggagctggacgtgctcctctccctccgccacccgcacatcgtccgcctcctcggctactgcgacgagcgcgacgagggcgtgctggtgttcgagtacgcgcccaacggcgacctccacgacgcgctccacgggcacggcggcgtcctcccctgggcgcgccgcgtggccgtcgcgctccaggtggccacggcgctggagtacctccacgagggccgcgacccggccccggccgtcatccacggcgacatcaaggcctccaacgtcctcctcgacgccaacatggacgccaagctctgcgacttcggcttcgcgcacgtcggcgtctcggccaccatgggcggcggccggcggccttcggaccgcgccgtcatgggctccccgggctacgtcgacccgcacctcctccgctccggagtggccaccaggaagagcgacgtgtacagcttcggcgtgctgctgctcgagctcttgacgggcaaggaggccgtctgccgcgagacggggcaccggctcacggccgcggtgaggcctcagctcggcgacggccaagtgtcggacgttctggaccagaggctgggaggagactacgacgccgctgaggcggccgccgtggcggagatcgccatgcagtgcgtcagtgacacccccgggctccggccatccatggccgacgtcgtgcgcgtgctccaggagaagacctccgccgttggatcgagactggaccgcaagatgttggtgtcctaaattagacgcatgccgcagattgtaaatatatccttgttggtgctagaattatgttgaggatagttagcagaagaattggcgcagtgagatgaggtaggaaaaaaaatgaagctttgagatcactagatcctgatagaaaattttgtcatgccatggagtgtttgttgaatcgggaacacagtagtactattttcat

SEQ ID NO: 4697 - DNA, 1299 bp, Zea mays
gcccacctaccactaccagtcgcggacgctcctcccacaactcgcgggtctcgagatgttcaggggttgcggcctgttcgccggcgcccgccgggggcgcggcggcgacctcaggaagcgcggggagcaaggcggcgcgagctcgcgggtggcgccggccgagcccgtgtgcgtggacgaggcggaggacggcggcgccgcgcggcagctggcgtgggcggaggtggagaccgccacgggcggcttctcgtccagggtggtcggccgcggcggcttcagcacggtgtacctcgcctcgctctcctcctcgcggctcggcgccgtcaaggtgcactgcagcagcgagcgcctccgccgcgcgttccgccgggagctcgacgtgctgctctccctccgccacccgcacgtcgtccgcctcctcgcctactgcgacgagcgcgacgagggcgtgctggtgttcgagtacgcgcccaacggcgacctccacgagaggctccacggcggcgcgggcgcgggcaccctcccctgggcgcgccgcgtggcggtcgcgttccaggtggcctcggcgctggagtacctccacgagggccgcgacccggccgtcgtccacggggacatcaaggcctccaacgtcctcctcgacgccagcatggacgccaagctctgcgacttcggcttcgcgcacgtcggcgtctcggccacgatgggcggccgccggccctcggaccgcgccgtcatgggctctccgggctacgtcgacccgcacctcctccgctccggagtggccaccaaggcgagcgacgtgtacagctttggcgtgctgctgctcgagctcctgacgggcaaggaggccgtctgccgcgagacagggcaccggctcacggccgcggtgaggcctaagctcagcgatggtgatcaactgccgggcgttctggaccagaggctgggaggagactacgacgccgctgaggcggccgccgtggccgagctcgccatgcagtgcgtcagtgacagccctgggctccgcccgtccatggccgacgtggtgcgcgtgctccaggagaagacctccgccgctggatcgagagtcgaccgcaagcaagatggtgtcctaagttagatgcctatggagtagtgtgtaaatatgtccttgatggtgctataattgtgttgagggtagttagccacaagaattggcgcagtgagatgaggttttagaatcactagatctctgatagaaaattttgtcatgccatcgagttgtcaatttgtcttgttgtgttaaaaaaaaaaaaaaaa

SEQ ID NO: 4698 - DNA, 1404 bp, Zea mays
aatctgccgcctcctctgtccaccctgtccccagcttatccaggaaggcacagccaggaacgcatcgtcactcaccagcaacatagtgattaaaggagcgagcagaggacttgttctctaccagccgcggccactcctcccacagctcgcggtcctcgaaatgttcaggggctgcggcctgttcgtctgcgcccgccgggggcgcggcgacctcaggaagcgtggcgagctaggcggcgcgagctcgcgggtggcgccagccgagccggtgtgcgtggacgaggcagaggacagcggcgccacgcggcagctggcgtgggcggaggtggaggccgccacgggtggcttctcgtccaaggtggtcggccgcggcgggttcagcacggtgtacctcgcctcgctccccacctcgtcgcggctcggcgccgtcaaggtgcactgcagcagcgagcgcctgcaccgcgcgttccgccgggagctcgacgtgctcctctccctccgccacccgcacgtcgtccgcctcctcggatactgcgacgagcgggacgagggcgcgctggtgttcgagtacgcgcccaacggcgacctccacgagaggctccacgggggcgcggccggcgtccaggtcctcccctgggcgcgtcgcgtggcggtcgcgttccaggtggccacggcgctggagtacctccacgagggccgcgacccggccgtcgtccacggggacgtcaaggcctccaacgtcctcctcgacgccggcatggacgccaggctctgcgacttcggcttcgcccacgtcggcgtcgcggccacgatgggcgggcggccctccgatcgcgccgtcatgggatccccgggctacgtcgaccctcacctcctccgctccggagtgcccaccaagaagagcgacgtgtacagcttcggcgtgctgctgctcgagctcttgacgggcaaggaggccgtctgccgcgagacagggcaccggctcacggccgcggtgaggcccaagctcagcgacggtcaattgccggacgtcctggacccgaggctgcgaggagactgcgacgtcgctgaggcggccgccgtggcggagctcgccatgcagtgcgtgagtgatagccccgggctccgaccgtccatcgccgacgtggtgcgcgtgctccaggagaagacctccgccgatggatcgagattgggcggcaagatgttgtcgtaagatagatgaacggcgcagattgtaaatatctccttgatggcgctagaattatgttgagggtagctagcagaagaattggtgcagtgagagatgaggtagggattaaaaatcaaagctttgaaatcactagatctgatagaaaaattttgtcatgcaactatgagtgttggttgtaaaaaaaaaaaaaaaaa

SEQ ID NO: 4699 - DNA, 1491 bp, Oryza sativa Japonica Group
acagatcaacgagggagaacttattctccctccactcacactcctcgcctcgcctcgcctcacttgtacccttcgattctctcccgtttcgtcgccctccagagctcgtggatctctcacttcggggcgggcgcgcgctagcacaatgttcaccggatgtggtctcttcgcctgcgtgcgccggtgcgatggcggcgacgtcaggaagcgcggggaggcaggtgcaatgagctcgcgggtggcggccgatccggccggcgtggaggaggaagggagctgcaagaacgtcgccgccgcgtcggcgaggcagctcgcgtgggcggacgtggagtccgtcacgggggggttctcgtcccgggtgatcgggcacggcgggttcagcacggtgtacctcgcgtcgctctcgtcctcccgcctcggcgccgtcaaggtccactgcagcagcgagcgcctgcaccgcgccttccgccaggagctcgaggtgctcctctccctccgccacccgcacatcgtccgcctgctcggctactgcgacgaacgagatgaaggtgtgctggtgttcgagtacgcgccgaatggtgacctccacgaacggctccactgcagcgaggtcgcgggcggcgtggcgtcggtgctgccctgggcgcggcgcgtggcgattgcgttccaggtggccatggcgctggagtatctccacgagagccgccacccggcggtcatccacggggacatcaaggcgtccaacgtcctcctcgacgccaacatgaacgccaagctctgcgacttcggcttcgcccacgtcggcttctcggccacggtggggtgcaggccgtcggcgcgcgccgtcatgggctccccgggatacgtagacccacacctcatccgctccggcgtggccacgaagaagagcgacgtgtacagcttcggggtgctgctgctcgagctcgtgacggggaaggaggccgtctgccgcgacaccgggcggcgtctcactgccgccgtaggtcccatgctcagcgaagggaaggtggccgacgttgtcgaccggaggctcggaggcgagcacgacggcgcagaggcggctgtcatggcggagctcgccatgcagtgcatcggcgacagccccgggctgaggccgtccatggccgacgtggtgcgcgcgctccaggagaagacctccgcgttggcttcggccgttggatcgagattggaccgcaagatgatgttttaacttttctgggtgtagactgtgaatagtaccagtattttagggtaggtaggagaagaatgtgtgtactgtgtagtttgagaaggtagattagtttaagcctttggatcagatagaaaattttgtgatgtcatggcatcttgtagcaccagtgaacgtatattagtagttcagtaattaaattctttccttgtagatcgcgtgtattaggtagtagtactttagatggttggtggtggacaagcaatttggtttcattttgg

SEQ ID NO: 4700 - DNA, 1491 bp, Hordeum vulgare subsp. vulgare
ggaggcgccagtgagccagcgggagcagccggtactacccatccattctttcccttctttctttcatccgctcccgcccgctgtccaacctgccccaggccagcagcttatccaggaaggcagcagcagcagcagcagcgccaacaagaaccagcaacaaaacccgagcgcagcagacgagagaaccaattctcccccccactcccactccacgcccaggcctcactcggagaaagaagagccgatcgatctgcacaatgtttcaagggtgcggcctgttcgcgtgcgtgagccggcggggcgcggacgtccggaagcgcggcgaggcgggcgcggccagctcgcgggtcgcggcggagccggcggcatgggaggagcaggaggaggccgacggcgccgccaggcggatggcctgggcggaggtggagtccgccacgggggccttctcgtcccgcgtgatcggccacggcggcttcagcaccgtctacctcgcctcgctctcctcctcccgcctcgccgccgtcaaggtgcactgcagcagcgagcgcctccaccgcgccttccgccaggagctccacgtcctgctctccctccgccacccgcacatcgtccgcctcctcggctactgcgacgaccgggacgagggcgtgctcgtcttcgagtacgcgcccaacggcgacctccaccagacgctccacggcgacgcgccgccgctcccgtggtcgcgccgcgtggccattgcgttccaggccgccacggcgctggagtacctccacgagggccgcagcccggccgtcatccatggggacatcaaggcgtcgaacgtcctcctcgacggtaacatggacgccaagctctgcgacttcggcttcgcgcactccggcgtctcgatcacggccggccggggcaggtcgtctgggcgcgcaatcatgggctccccgggctacgtcgacccccagctcctccgcaccggcgtggccaacaaggagagcgacgtgtacagcttcggcgtgctgctgctcgagctggtgaccgggagggaggccgtgtgccgcgacaccggacgccgccttaccgcggtcgtgtgccccatcgtcaacgacgggaacgtggccgaagtggtggaccggaggctcggcagccaatacagcgccgacgaggcgaccgtcgtggcggagctcgcgatgcggtgcgtcagcgaagcccccgggctcaggccgtccatggcggacgtggtgcacgtgctccaggagaagaccaccgcgttgatctcggccgtcggatccagattggaccgcaggatcatgttctagcctgcctggctcatggctggtgctgttgattgtgatttgtgaatagtgattacagtaagttagggcaggtagaagaacgaatgtctccgcagtgtgagtactcagattagtttaagccttgggattaggtagaaatttttgtgatgtcatggcacatatactagtatattgtagcacc

SEQ ID NO: 4701 - DNA, 2514 bp, Sorghum bicolor; identical to SEQ ID NO: 1583

SEQ ID NO: 4702 - DNA, 1854 bp, Zea mays
gctctcagccgccaacgccatgggctccaccgccgctgcctccgtgctcccggtgtccgccggctccggcgagaacctcgtcctcatcctcgactacggctcgcagtacacgcacctcatcacccgccgcgtgcgccagctcggcgtcctctccctctgcgtgtccggcacggcgccgctcgcctccctggagggcctccgcccacgcgccgtcatcctctccggcgggccccactcagtccacgcccccggggcgcccgccttccccgagggattcctgggcttcgcggctgccgcgggcgcgcacgtgctcggcgtctgctatgggatgcagctcctcgtgcagtcccttggaggcgccgttgtgtccggggagcgccaggagtacgggaaaatggacgttgaggtgacggcggcctcctccgcgctctacgggcaggcggagaccgggaagcgccagacggtgtggatgagccatggcgacgaggtggttaggctgccggaagggttcgaggtggttgctcgcagcgtgcagggagccgtcgcggccattgagaaccgggagaatcgcttttatgggctccaataccaccccgaggttacacattcagcccaaggaatggaaacactgcgccgctttctctttgatgtttgtgggatcaaagctgattggaagatgcaagatgtgctcgatgaagaaatcaagaccatccaaagcacggttggccctgacgagcatgttatctgtgcattgtcaggtggtgttgattcaacggtcgccgccactctcgttcacaaggcgataggagataggcttcactgtgtttttgttgataatggtctattaaggtacaaggagggagagcgagtaatgacaacctttgaaagtgatttgcacctgccagtgacatgtgttgatgcctcagagcaatttctcagcaagttaaagggtgtcgaagacccagagaagaaaagaaagatcattggcagggaattcatagctgtctttgatgactttgctcacaagctggaacagaagataggaaaaaggcccgaatatttagttcaagggactttgtaccctgatgtaattgaatcatgcccacctcctgggagtggaaggacacattcccacaccatcaaaagccatcacaacgtaggtggccttccaaaagatatgaaattaaaacttattgaaccactcaagctcctattcaaggacgaggtgcggaagttggggggtattttgaatgtcccagattcatttttgaagcgacacccatttcctgggcctggtcttgcagtacgtgtcctaggtgatgttacacaaggcaatgctttggaggttcttcgtcaggtggacgagatatttgttcagtctattaaagacgcaggcctgtatgataaaatttggcaagcttttgctgtgttcttgccagtacagacagttggagttcagggtgaccagcgaacccactccaatgccgttgttttaagggcaatcaccagtgaggatggcatgactgcagattggtactattttgagcatgcattcctggtagatgtggtaaacaagatttgcaacaatgtgcgtggcatcaaccgcgtttgccaggacatcacatctaagccgcctgcaacggtggagtgggagtaggaggatgggagggaccctatggtctggtctgtctgtctgtcttgggttaaaacccgctatgtcatgtcactgctctcaacacgttgcatggatgtcacaaatagcaagcagttaagagtgaccattcgtcagtcaatacattaggtttatcatgaattgtttgttacttaatacaaggactgcattgcatggattgt

SEQ ID NO: 4703 - DNA, 1988 bp, Oryza sativa Japonica Group
gggtaactccccaccttaaaccccagacaccctcaaaaaccctaatcccctccctcccgccgccgccgccgccgccgccgccatgggctccgcctccgcttcctcgctcccggcctccgccggcttcggcgagaacctggtcctcatcctcgacttcggctcgcagtacacccacctcatcacccgccgcgtccgccagctgggggtcctctccctctgcgtctccggcacggcgccgctcgcctcgctcgcgggcctccgcccccgcgccgtcgtcctctccggggggccccactccgtacacgcctcgggggcgcccacgttccccgaggggttcctcgagttcgccgccggcgcgggcgcccacgtcctcggcgtctgctacgggatgcagctcctcgtgcagtccctcggcggcgccgtcgaggccggcgagaagcaggagtacgggaagatggaggtggaggtaaccgcccgctcctcggcgctgtacggggagggggaggtcgggaagcgccagacggtgtggatgagccacggggatgaggtggtgaggctgccggaggggttcgaggtggtggcgcgcagcgtgcagggtgccgtcgctgccgtcgagaaccgtgagaagcgcttctatgggcttcagtatcaccctgaggtgacacattcaccccaaggaatggaaacactgcggcgcttcctttttgatgtttgtgggataaaagctgattggaagatgcaagatgtgctggatgaagaaattaggacaatccaaagcatggttgggcctgatgaacatgtgatttgtgctttatctggtggagttgattcaactgttgctgccactctggttcacaaggcaataggggatagacttcactgtgtttttgttgacaatggcctattaagatacaatgagagggaacgggtaatgttaacctttgaaagtgacttgcaccttcccgtcacatgtgttgatgcatctgagcaatttcttagcaagctaaagggtgtcaaagatccagaaatgaagagaaagataattggaagggaattcatagcagtttttgatgattttgctcacaaattagaacagaagataggaaaaagacctggatatttagttcaagggacactgtaccctgatgtgattgaatcatgcccacctcctggaagcggaaggacacattctcataccatcaaaagccatcacaatgttggtggtcttccaaaagatatgaagttaaagctaattgaaccactcaagctcttatttaaggatgaggtacggaagttggggagtattttaaatgtcccagagtcattcttgaagcgacacccatttcctgggcctggtcttgctgtacgtgtcctaggtgatgttacagaaggcaatgctttggaggttcttcgtcaggttgatgaaatatttgttcaagccattaaagatgcaggtctctatgatataatttggcaagcatttgctgtgtttttgcctgtacaaacagtgggagttcagggtgaccagagaactcactccaatgcagttgctttgagggcaattactagtgaggatggcatgactgcagattggtattattttgagcgtgagttcctggtagatgtggtcaacaagatctgcaacaatgtgcgaggtgttaaccgtgttgtccaggacatcacgcaaaagccacctgcgacagtggaatgggaataggaacttcgtgctctgaattctgatgccgtggagtggcctacttttatgctgcaatggagtgggaatatcaacatattcccatattatacatatagctgtttattactagattgtttgtttacatcctttgacaaatccctatttgtcaacctgtgatagattttgaactgagaaaagctttgaactgcacttattaactgtgctttctattcttgaatagatatcttcacctttgaagaccttttatcttttggagtaaatctttgttgct

SEQ ID NO: 4704 - DNA, 2004 bp, Hordeum vulgare subsp. vulgare
gggggcatccatccggcccccaaaccacccattcgcaccccaaaccccaaaaccctaccccccaccccctccccgccgccgccgccgccgccatgggctccgcctcggccgcctcgctcccgacctcggcgggcgcgggcgagaacctggtcctcatcctcgacttcgggtcccagtacacccacctcatcacccgccgcgtccggcagctgggggtcctctccctctgcgtctccggcacggcgccgctctcctccctcgccgggctgcggccccgcgccgtcgtgctctccggcgggccccactcggtccacgcccccggggcgccctccttccccgacggcttcctcgggttcgccgccgccgccggcgcgcacgtcctcggcgtctgctacgggatgcagctcctcgtccagaccctcggcggcgccgtcgagcccggcgtgcgccaggagtacggcgacatggaggtggacatcaccgcgccctcctccgcgctctacggcgaggccggggaccggcagtccgtgtggatgagccacggcgacgaggtcgtcaggctgcccgaggggttcgaggtcgtcgcgcgcagcgtgcagggcgcaatcgccgccatcgagcaccgggagaagcgcttctatggcctccagtaccacccggaggtgacacattcgccccaagggatggaaacgctgcgccactttctgtttgatgtttgtgggattaaagccgactggaagatgcaagatgtgctggatgaggaaatcaagaccatccaaagtatggttgggcccgacgaacatgtgatttgcgcgttatcaggaggagttgattcaacagttgcagccactcttgttcataacgcgataggggataggctccactgtgtttttgtggacaacggtctattgagatacaaggagcaggaacgagttatgtcaaccttcaatagcgacctgcaccttcctgtcacatgtattgatgcctcggagaaatttcttagcgagttaaaaggagtcaaagacccagagacgaaaagaaagattattggcagggagttcatagttgtatttgatgaacttgctcgcatgttggaacagaagctaggaaaaagacccgagtatttggttcaaggaacattataccctgatgtgattgaatcatgcccaccacctgggagtgggaggacacattcgcacaccatcaaaagccatcacaatgtaggtggtcttcctaaagatatgaagttgaagctcattgaaccactgaagctcctatttaaggatgaggttcggaagctgggaagtatcctgaacgtcccagagtcattcttaaagcgacatccatttcctgggcctggtcttgctgtacgtgtcataggcgatgttacagcaggcaatgctttggaggttcttcgtcaggtggatgagatatttattcaagccattaaagatgcaggcctctatgatgaaatttggcaagcttttgctgtgtttttgcctgtccaaacagttggggtccagggtgaccagagaactcactcccatgtggttgctttaagggcaattaccagtgaggatggcatgactgcaaattggtatgattttgagcgccagttcctggttgatgtggtgaagaagatctgcaataacgtgcggggcgtcaaccgtgttgtcctggacgtaacatcgaagccaccagcgacggtggagtgggaataggatggtggtgatttgatggtgcaataacgggctgggaattgcaaaaatcatgctctgatgctgttgcaacgctgcagtgggtttagtgctaaatttgcagttcagttatttatctgtaggttatgcttagaaaaatatggatctaatatgcttagacaaatatgaatctattgtgtatcttttatgccttttgatttttctacccccatccttctaaaattgattatatatgggagtagctgattttcattttacatgcgctaggaatttctttgatcttggg

SEQ ID NO: 4705 - DNA, 1930 bp, Vitis vinifera
atggaccccgagaacgtgaagtcaaacctagttttgattctcgattacggctcgcaatacacacatctcatcactcgccgaatccgaagcctatcggtcttctctctgtgcatctccggcacatcgtcgctgaaatccattgtcgacctcaagccgcgtgtcatcatcctgtctggcggcccccactccgttcactcgccgaactcgccgagcttccctgacggcttcgtcgactacgtggagtcgaacggcgtgttcgtgcttggcatttgctatgggctgcagttgcttgtgcaaaggttgggtggaattgttagggttggggagaggcaggagtatgggaggatggagattgaggtcgtgagggcttgtgggttgttcgggtccaaggaagtcggccataagcagactgtatggatgagtcatggcgacgaggccgcagaattgccagaggggtttgaggtggtggcgcgcagccagcagggggcagtggctgcggttgagaatagggagcggaggttttacggccttcagtatcatccggaggtgacacattccccagaaggtatggaaacactgcggtatttcctctttgatgtatgtagagttgatgcaggatggaatatggaagatgtccttaatgaggaaattaaattgatcaaaggcatggttgcgcctgatgatcatgtcatctgcgcgttatctgggggtgtggattccacagttgcagctactcttgttcacaaggcaatcggagatagacttcactgtgtatttgttgacaatggtttattgaggtataaggagagagagcgtgtgatggaaacctttgaaagggatcttcatttgcctgttacttgtgttgatgccacaaatcaattccttagtaagctgaaaggtgtggtagatcctgagatgaaaaggaaaattatcggaaaggagttcatctccagctttgatgcatttggccaagatttggaacataaatttggaaagaaacctgtttacttggtccaaggaacattgtaccctgatgtgattgaatcttgcccaccacctggaagtggaagaacgcactcccacacaatcaagagccatcataatgttggagggcttcctaaggatatgaaattgaagcttattgaaccacttaaacttctgtttaaagatgaggttcgtgaacttgggaggatcttgaatgttcctcgggcatttctacagcgccatccgttccctgggcctggtcttgcagtgcgagttttgggggatgttacagaaggaaatgccttggatattctacgccaggttgacgagatttttattcagtcaatcaaggatgctgggatttatgattctatttggcaagcttttgcagtgtttttgccaataaggtcggttggggttcaaggtgatcaaagaacacattctcatgttgttgctctcagagctgttactagtcaagatggaatgacagcagactggtacaattttgagcacaagttccttgatgatgtggcaagaaaaatttgcaatagtgttcgaggtgtaaaccgagtcgttcaagacattacatcaaagcctccatcaacaattgagtgggaatgaagccatgtcggaggttgatggttagatggaaatcgagtaaggaactctatggccttatacaagtgcaggtttttaatcaattatagttactgttagtggttgccttcccatgacatgaaatacagttaagctcggcgggaagagaattgagccatgtggaatttcactttatttaatgcttgagatcggtgctcttagcaatatttcctagctctcatgaggtcatgattctttgtatggacaattccacaaacccttttgtggaaacttgcaatgataaattattattctccctttgatgctttgatgtatcaaggaattttta

SEQ ID NO: 4706 - DNA, 1605 bp, Populus trichocarpa
atggacccaaaagcagtgaaatcagacctagtacttatcctcgactacggttcacaatacactcatttaattacacgaagaatcaggtccctgaacatcttctctctctgtatctcaggcacttcttcattagaaaccataacttcacacaaccccaaagttgttatcctctcaggtggaccccactcggtccattctgccaattcaccaactttcccatctgggtttgtcgagtgggctcaaaaaggtggtatctttgtgttgggggtatgttatgggctgcaattgattgtgcaaagattgggcggtcaagttgatgttggtcaaaggcaagagtatgggaggatggagattgaagtggagaagaatttgggtgtttttggaaataagaaagttggggataagcaggttgtttggatgagtcatggtgacgagactgttaagttgccttatgggtttgaagttgtggctaggagtcaacaaggggcggttgccgcagttgaaaatagagaaatgaggttttttggcttgcagtatcatccggaggtgactcattcacccgagggcatggatacactgcgatacttcctgtttgatgtttgtggagtctctccagggtggaacatggaaaatgttttggatgaagaaatcagggtgatcaatgacgcagtggggcctgaagagcatgtcatatgtgcattgtcagggggtgtggattccacagttgctgcaactcttgttcacaaggcaattggagataggcttcattgtatttttgttgataatggcttattgagatataaagagagagaacgtgttgcggaaacttttgaaagtgatctgcatctaccggttacttgtgttgatgcatcaaatgaattccttagtaagctgaaaggcgtggtggatcctgagatgaaaaggaaaattattggaaaggagtttattagcatctttgatgcttttgcccatgagttggagcagaaattgggaaagaaacctgcgtacttggtccaagggaccttgtatccagatgttattgaatcttgcccacctcctggatctggaagaacccactctcacactatcaagagccatcataatgttggagggcttccaaaggacatgaaattgaagctcattgaaccacttaaacttttatttaaggatgaggttcgtcagctaggaagaatcttgaatgttcctgatgcatttctgaagcgccaccctttccctggtcctggccttgccgtacgagtcttgggtgatgtaactgaaggcaatgctttagatatcctccgccaggttgacgagatttttattcagtccatcaaggatgctgggctatatgattcgatttggcaagcttttgcagtatttcttcctgttagatcagttggagttcaaggtgatcaaagaactcattctcatgttgtcgctcttagagctgttacgagtcaagatggaatgacagctgattggtactattttgaacacaagttccttgatgacgtggccagaaaaatctgtaatagtgtaagaggtgtaaaccgagttgttcaagacatcacatcaaagcctccgtcaacaattgagtgggaatga

SEQ ID NO: 4707 - DNA, 1700 bp, Arabidopsis lyrata subsp. lyrata
ccaagctctaaaaccctatccatggagacgccgacgatgaagcctgatacggttttgattcttgattacggctcccagtacacacatctcataactcgccgtattcgttctctcaacgtcttctctctcgtaatcagtggaacttcatcgctcaaatcaatcactagctataacccacgagtcgttatcctctccggtggacctcactctgttcacgcgctcgacgcgccgagttttcccgacgggttcatggagtgggcagagtcgaacggtgttcatgttttggggatttgctatggtttgcaattgattgtgcagaagcttggaggtgttgttgtggaaggagaaagtaaagagtatgggaagatggagattgaagtgaagggcaaatcggagatttttgggtcggggagtggtggagagaagcaaatggtttggatgagtcatggtgatgaagcggttaagcttcctgaagggtttgaagttgtggctcagagtgctcaaggagctgttgctgctttggagaatcggaagaagaagatttatggattgcagtatcatcctgaggtaactcattcaccaaaagggatggagacacttcggcacttcctctttgatgtatgtggagtatctgccgattggaaaatggaggatctgatggaagaagagatcaaagtgattaaccaaaccgttgcatctgacgaacatgtcatttgcgccttgtcaggaggtgtggactctactgttgctgcaactcttgttcacaaggcaattggagataggcttcattgtatctttgttgataacgggctattaaggtataaggagcaagaacgtgtgatggatacctttgagagagacttgcatctacctgttacttgtgttgacgcatccgagcggtttttgagtgaacttaaaggcgttgtggatcccgagaccaagagaaagataatcggaaaggagttcatcaacatttttgatcaatttgcccaagagttagaaaaaaagcatgggaagaaacctgcttttctagttcaagggactctgtaccctgatgtgattgagtcgtgccctccccctggtactgatagaactcattctcacaccatcaaaagtcatcataacgttggaggactccctaaagacatgaaattgaagctgatcgaaccactcaagcttctcttcaaagacgaggttcgtgagctcggaagaatcttgaatgttcctgtaggattcttgaagcgtcacccattccctggtccgggactcgcagttagagttttgggcgatgtcacccaaggaaacgccctcgaggttcttcgtcaggttgatgagattttcatccaatcaatcagagatgcgggtctctatgattcgatctggcaagctttcgcagtgttcttgcctgtaagatcagttggagtccaaggtgacaagagaacacattctcatgtggttgctctacgggcagttacaagccaagatggaatgactgcagactggttcaattttgagcacaagtttttggacgatgtttcccggaaaatctgtaacagcgttcaaggagtaaaccgtgtggttcaagacattacatcaaagcctccttcaacgatcgaatgggaataaagtaaaaacataaatttgagtcttttatttatgggtgtctgcaattcttctaccatgtaaaatagattatcatc

SEQ ID NO: 4708 - DNA, 1936 bp, Arabidopsis thaliana
gtgattcagacaatattcacaaaaccctagttgctgctcctgctctgtttttataagcctccacttcccgccaagcccctcttagccataaacagtgaaaaacccttttgttccttcaccaagctctaagaccctatccatggagacgccgacgatgaagcctgatacggttttgattcttgattacggctcccaatacacacatctcatcactcgccgtattcgttctctcaacgtcttctctctcgttatcagtggaacttcatcgctcaaatcaatcactagctataacccacgagttgttatcctctccggtggtcctcactctgttcacgcgctcgacgcgccgagtttccccgaggggtttatcgaatgggcagagtcgaacggtgtttctgttttggggatttgctatggtttgcaattgattgtgcagaagcttggtggtgttgttgtggaaggagagagcaaagagtatgggaaaatggagattgaagtgaaaggtaaatctgagatttttgggtcagagagtggtggtgagaagcaaatggtttggatgagtcatggtgatgaagcggttaagcttcctgaaggatttgaagttgtggctcagagtgctcaaggagctgttgctgctttggagagtcggaagaagaagatttatggattgcagtatcatcctgaggtgacacattcaccaaaaggaatggagacacttcggcatttcctctttgatgtgtgtggagtatctgcggattggaaaatggaagatctgatggaagaagagatcaaagtgattaacaaaaccgttgcatctgacgaacatgtcatttgcgccttgtcaggaggtgtagactctactgttgccgcaactcttgttcacaaggcaattggagataggcttcattgcatctttgttgataacgggctattaaggtataaggagcaagaacgtgtgatggatacctttgagagagacttgcatctacctgttacttgtgttgatgcatccgagcggtttttgagtgaacttaaaggcgttgtggatcccgagacaaagagaaagataatcgggagggagttcatcaacatttttgatcaatttgcccaagagttagagaaaaagcatgggaagaaacccgcttttctagttcaagggactctgtaccctgatgtgattgagtcgtgccctcccccgggtactgataggactcattctcacaccatcaaaagtcaccataatgttggaggactccctaaagacatgaaattgaagctcatcgaacccctcaagcttctcttcaaagatgaggttcgtgagctcggaagaatcttgaatgtgccggtagggttcttgaagcgtcacccattccccggtccaggactcgcagttagagtcttgggcgatgtcacccaaggaaacgcccttgaggttcttcgtcaggttgatgagatattcattcaatcaatcagagatgcgggtctctatgattcgatctggcaagctttcgcagtgttcttgcctgtaagatcagttggagtccaaggtgacaagagaacacattctcatgttgttgctcttcgtgcagttacaagccaagatggaatgaccgcagattggttcaattttgagcacaagtttctggacgatgtttcccggaaaatctgtaacagcgttcaaggagtaaaccgtgtggttctagacattacatcaaagcctccttcaaccatcgaatgggaataaagaaaacatatactgagtcttttatttatgggtgtctgcaattcttctaccatgtaaaatagattatcatcaaacaatgatggtgaatttgtgacggtgcttattattactattattagtagacaatggttttctgatgaactagatgagcaatgatgatggtgatacaaatcataccaaaaacttgcatac

SEQ ID NO: 4709 - DNA, 1958 bp, Arabidopsis thaliana
gtgattcagacaatattcacaaaaccctagttgctgctcctgctctgtttttataagcctccacttcccgccaagcccctcttagccataaacagtgaaaaacccttttgttccttcaccaagctctaagaccctatccatggagacgccgacgatgaagcctgatacggttttgattcttgattacggctcccaatacacacatctcatcactcgccgtattcgttctctcaacgtcttctctctcgttatcagtggaacttcatcgctcaaatcaatcactagctataacccacgagttgttatcctctccggtggtcctcactctgttcacgcgctcgacgcgccgagtttccccgaggggtttatcgaatgggcagagtcgaacggtgtttctgttttggggatttgctatggtttgcaattgattgtgcagaagcttggtggtgttgttgtggaaggagagagcaaagagtatgggaaaatggagattgaagtgaaaggtaaatctgagatttttgggtcagagagtggtggtgagaagcaaatggtttggatgagtcatggtgatgaagcggttaagcttcctgaaggatttgaagttgtggctcagagtgctcaaggagctgttgctgctttggagagtcggaagaagaagatttatggattgcagtatcatcctgaggtgacacattcaccaaaaggaatggagacacttcggcatttcctctttgatgtgtgtggagtatctgcggattggaaaatggaagatctgatggaagaagagatcaaagtgattaacaaaaccgttgcatctgacgaacatgtcatttgcgccttgtcaggaggtgtagactctactgttgccgcaactcttgttcacaaggcaattggagataggcttcattgcatctttgttgataacgggctattaaggtataaggagcaagaacgtgtgatggatacctttgagagagacttgcatctacctgttacttgtgttgatgcatccgagcggtttttgagtgaacttaaaggcgttgtggatcccgagacaaagagaaagataatcgggggggagttcatcaacatttttgatcaatttgcccaagagttagagaaaaagcatgggaagaaacccgcttttctagttcaagggactctgtaccctgatgtgattgagtcgtgccctcccccgggtactgataggactcattctcacaccatcaaaagtcaccataatgttggaggactccctaaagacatgaaattgaagctcatcgaacccctcaagcttctcttcaaagatgaggttcgtgagctcggaagaatcttgaatgtgccggtagggttcttgaagcgtcacccattccccggtccaggactcgcagttagagtcttgggcgatgtcacccaaggaaacgcccttgaggttcttcgtcaggttgatgagatattcattcaatcaatcagagatgcgggtctctatgattcgatctggcaagctttcgcagtgttcttgcctgtaagatcagttggagtccaaggtgacaagagaacacattctcatgttgttgctcttcgtgcagttacaagccaagatggaatgaccgcagattggttcaattttgagcacaagtttctggacgatgtttcccggaaaatctgtaacagcgttcaaggagtaaaccgtgtggttctagacattacatcaaagcctccttcaaccatcgaatgggaataaagaaaacatatactgagtcttttatttatgggtgtctgcaattcttctaccatgtaaaatagattatcatcaaacaatgatggtgaatttgtgacggtgcttattattactattattagtagacaatggttttctgatgaactagatgagcaatgatgatggtgatacaaatcataccaaaaacttgcatacaaaaaaaaaaaaaaaaaaaaaa

SEQ ID NO: 4710 - DNA, 678 bp, Sorghum bicolor
atgaacaagcttcacgtcgccacggtggcttccctcctggcgctggccgccgcaacggccggcgccgtcacgttcgatgcgacgaacacagcgtccaacacccccggcgggcagcggttcgaccaggccgtcggcgtcaactacgccaagcaggtcctctccgacgcgtccacattcatctggaacaccttcaaccagcgcagccccgccgatcgcaagcccgtcgacgccatcaccctcgtcgtcgaggacatcggcggcgtggccttcacgagcgccaaccggatccacctcagcacccagtacgtcggtaactactccggcgacgtcaagacggaggtcaccggcgtgctgtaccacgagacgacgcacgtgtggcagtgggacgggcagggcaaggcgaacggcggcctcatcgagggcatcgccgactacgtgcggctgaaggccgggtacgcaccgtcgcactgggtgaagccggggcagggagatcggtgggatcaggggtatgatgtgacggcgaggttcctggactactgcgactcgctgaagccgggcttcgtcgcgctgctcaacgccaagatgaagggcggctacaccgacgatttcttcgcgcagatcctggggaagaccgtgcagcagctgtggaaggattacaaggccaagtacggaggctga

SEQ ID NO: 4711 - DNA, 905 bp, Zea mays
aaccaactgagctgagcaagaaggcaagcaccaatcagccagcagtccagcacaatatcatgaacaagcgtcaggtcgccgcggcggtggctgccctcctggcgctgctagccgcatcatcgacggccggcgccgtgacgttcgacgcgacgaacacggcgtccgatacccccggcgggcagcggttcgaccaggccgtcggcctcgactacgccaagcaggtcctgtccgacgcgtccacgttcatctggaacaccttcgaccagcccagccccgccgaccgcaagcccgtcgacgcggtgaccctcgtcgtcgaggacatcggcggcgtggccttcacgagcgccaacgggatccacctcagcgcgcagtacgtcggcggctactccggcgacgtcaagaccgaagtcaccggcgtgctgtaccacgagacaacgcacgtgtggcagtgggacgggcagggccaggcgaacggcggcctcatcgagggcatcgccgactacgtccggctgaaggcggggtacgcgccgggccactgggtgcagccggggcagggggaccggtgggaccaggggtacgacgtcacggcgaggttcctggactactgcgactcgctcaagccgggcttcgtcgcgctgctcaacgccaagatgaaggacggctacaccgacgacttcttcgcccagatcctgggcaagaccgtgcagcagctgtggcaggactacaaggctaagtacgggggctgatgatggtgatgcaaattggtggcggtgcgaagtcaacgcgtcaatggctcaatgcgtttggtatgagatgctattatgtgctagtacgtacactctgtgtgtaaaatatatagagaaaataaaagggatcggataattaaaccaaaaaaaaaaaaaaaa

SEQ ID NO: 4712 - DNA, 881 bp, Hordeum vulgare subsp. vulgare
atctaccatagctcagcgacacaggcacgtagtagcaacacccactacaaaatgaagcttcaggtagccacggtcgcctccttcctcctggtggccttggccgcgacggcccaggcagtgacgttcgacgcgtcgaacaaggcgtcgggcacctccggcggccggcggttcgagcaggccgtcggcctcccatactccaagaaggtcctctccgaggcctccgccttcatctggaaaaccttcaaccagcgtgccgtcggcgaccgcaagcctgtcaacgcagtcaccctcgtcgtcgaggacatcagcggcgtcgccttcaccagcgccaacggcatccacctcagcgcccagtacgtcgccagcatctccggcgacgtcaagaaggaggtgaccggcgtgctgtaccacgaggcgacgcacgtgtggcagtggaacgggcagggcaaggcgaacggcgggctcatcgaggggatcgccgactacgtgcggctcaaggccgggttcgcgccggggcactgggtgaagccggggcagggcgaccggtgggatcaggggtacgacgtcacggcgaggttcctcgactactgcgactcactgaagcccgggttcgtcgcgcagctcaacgccaagatgaagagtgggtacaccgacgacttcttcgcgcagattctcggcaagaacgtgcagcagctgtggcgggactacaaatccaagtttggagcctgaatacacgattagcctacttgacggtgtgatggcatagcgcactatatatatcgaaatgatcaacaaaacaagtgctttatgccctgtataataaataaaagataaataaaacgactttggcaaaaaaaaaaaaaaaaaaaaaaaaaaaaaaa

SEQ ID NO: 4713 - DNA, 859 bp, Hordeum vulgare
cgcgacacaacggaaatagagctccaacacccaccccaaaatgaagcctcaggtagccacggtagccttcttcctcctggtgaccatggccgcgacggcgcgcgccgtgacgttcgacgcgtcgaacacggcgtcgggcaccgccggcggccagcgcttcgacaacgccgtcggcctcgcctactcgaagcaggtcctctccgacgcctccaccttcatctggaacaccttcaaccagcgcgccgctgcggaccgcaagcccgtcgacgccgtcaccctcgtcgtggaggacatcggcggcgtcgccttcgccagcggcaacggcatccacctcagcgccaagtacgtcggcggctactccggcgacgtcaagaaggaggtgaccggcgtgctgtaccacgaggcgacccacgtgtggcagtggaacgggcggggcacggcgaacggcgggctcatcgaggggatcgccgactacgtgcggctcaaggccgggctggcgccggggcactggaggccgcaggggagcggcgaccggtgggatcagggatacgacatcacggcgaggttcctcgactactgcgactcgctcatgcccgggttcgtcgcgcagctcaacgccaagatgaagagcgggtacagcgatgatttcttcgcgcagattctcgggaagaacgtccagcagctgtggaaggactacaaagccaagttcggaggctgaatgtgatttactcattcattccttcttcacggtgtgatggcacaacacactatacgtattgaaataatcaacaaggcatgagctttacgttgtaataaaatttaaataaatgatttgtgtaaaaaaaaaaaaaaaaaaaaa

SEQ ID NO: 4714 - DNA, 906 bp, Sorghum bicolor
atggcgcctacactctcaagcgacatgacgacgatgaggcgtgccgccgtcgtcgtcgtagcgctcgcttctctcctggccggcgtggcggccgccggcgcggtcacgttcagcgcgacgaacgccgcgtcgagcacggcgggcggcaagcggttcggccgggacatcggcgtcgcgtactcgaggcgagtgctctcggacgcctcctccttttgctggaagaccttcagccagcccaaccccggcagccgcaagcccgtcagctccgtcaccctcgtcgtcgaggacatcggcggcgtggccttcaccagcggcaacggcatccacctcagtgcccagtacgtcggcggctactctggtgacatcaagacagaggcggctggggtgctgtaccacgaggtaacgcacgtgtggcagtgggacggacagggcaaggcgaacggcggcctcatcgagggcatcgccgactacgtcaggctgaaggccgggtacgcgccggggcactgggggaagccggggcagggagaccggtgggatcaggggtatgatgtgacggcgaggttcctggattactgcgactcgctgaagccgggcttcgtcgcgcagctcaacgccaagatgaaaggcggctactccgacgatttctttgcgcagattctggggaagaatgtgcagcagctgtggaaggattacaaggccaagtacggaggctgatgtgtgttggtgtagctacaagtgctagtgcatgcgacgagaaagatggatctttatcagcgcaggcatcgactatccgatcatatatatataatcaataatgcatgcattcactaatttgtactattagcttgtattggggggaaaaaagaactatatgatatgcttacatcaacgtaacaacgtttactc

SEQ ID NO: 4715 - DNA, 894 bp, Triticum aestivum
cagcgacacaggcctgcaagcctgcaacactcgctacaaaatgaagcttcaggtagccacagtcgcctccttcgtcctggtggccttggccgcggcggcccaggccgtgacgttcgacgcgtcgaacaaggcgtcgggcacctccggcggccggcggttcaaccaggccgtagtcccatactccaagaaggtcctctctgacgcctccgccttcatctggaaaaccttcaaccagcgcgccgtcggcgaccgcaagactgtcgatgccgtcaccctcgtcgtcgaggacatcagcggcgtcgccttcaccagcgccaacggcatccacctcagcgcccagtacgtcggcggcatctccggcgacgtcaagaaggaggtgaccggcgtgctgtaccacgaggcgacgcacgtgtggcagtggaacggcccagggcaggcgaacggcgggctcatcgaggggatcgccgactacgtgcggctcaaggccgggttcgcgccggggcactgggtgaagccggggcagggcgaccggtgggatcaggggtacgacgtcacggcgaggttccttgactactgcgactcgctcaagcccgggttcgtcgcgcacgtcaacgccaagatgaagagtgggtacaccgacgacttcttcgcgcagattctcgggaagaacgtgcagcagctgtggaaggactacaaagccaagtttagaggctgaacgcaccataagttgatgggtccttcacggtgtgatggcataacgcactacttcgaataagacatgtgtgatggcataacacaccatatactgaaatgatcaacagaacatgtcccttacgctctgtagtgaaagataaataaacgatttcactaattcgaaaaaaaaaaaaaaaaaaa

SEQ ID NO: 4716 - DNA, 1691 bp, Zea mays; identical to SEQ ID NO: 1584

SEQ ID NO: 4717 - DNA, 1705 bp, Zea mays
  misc_feature (430)..(431): n is a, c, g, or t
attattatttcttcttccagcgggcaattcctggccaccaccgggcgcgctgcaccgcgctatattactccgggctcgtggacaagcatgcagaggggcgtgtccttccctggcggaatggcggaggagtgcccgcccgccggcggcgccgagctctggctcccggacgagttcctggacgacgacttcttctccgaggaggagaaggcggcggtcgcggccaagagcgagagcgacgaggaggaagggatggacggcctctcgcgccgcgcggccgggctcgtcgtcgggggtggaggggacggttcccctgcaaaggcgcaagtgttagccggctcgccgcagtcgattctgtgcggcctgcatgcttccggggaggrcagccccaacggcgcggcgtcgcaggtcagctcgccgccgtcgtcgccgnngwwtaagacgccggccgacccctgggacctgctcaaagaggcggccggccaggtggcccgcatgcgcacaactagcggcatcctggtggcaacgaacgcgggcgcacatcaaagacaccccgtcccgccgctggcgcagaagctctctgcgccggccgacgctcccaaggccgcgggtgccaacctccctcaggctcagccgaagaactcgatggaacatcgccggattcagattgctcgttttaatgcgctgaagcagcagcagctcctgaagcacatgcgggagcgggagctcgccgtcgctacggcggcggcgtggggcacgagcgtcgcggggtctcatcgtgccgccgggtaccgtgcgccggcgccccatgtcctgagctcgtccgcgtggcccaccctccagaagcagcagcagcagcaaagggcggtgtccccggcgggcatgcgcgccgtcttcgtggcccctcctggcgccaagcgcgagtgcgccggcaccggcgtgttcatcccccgccaggccggcgcccccgcggagcccaagaaaaggccagcagcgtgcgcccctgtccttctcccggcgcgcgtcgtgcaggcgctcaacctcaacgtcgaggacctcggggcccgtcccatctacccgggcggcttcgtcctcgaccacgatgcactggtgagccggagcaacgctctgctggcgagccgcgcgtcccagcagctccatggcgcttcgtcgcgcgaggtgaatctcccccaggaatggacgtactgagggcgccgattcgccaccgcaccgctgcaagatgactcgacgatcactccagattaacggggggtgtcaaaaaaaaattactattgctattggtagcaataggtattataggtgttgttaggctagaagtaggaggcagcggtggtgtggcattacgcgccagcgttaggtgttcttttgtgcgggggtgatatattggttattttgggactgacggacgggttggtgatgagcaagagcgaaatcaatcatccgtggctctcgcaggtccgttgggggcggaggggagaaacagcaataataataataagtgggtgcttttgggggaggggagagaggggggtttkgaactaatcctatgtttagctggttctggtactacgatggtttcccaagggaaaatcatcaagcattcagcagtctgtgaaagagatgtctcgtcactgtaagcaaataataataataataaacaggagctccacwaaaaaaaaaaaaaaaa

SEQ ID NO: 4718 - DNA, 1685 bp, Sorghum bicolor
atcgtgtccgtgctggccattattatttcttcctccagcggcaatttctggccggccaccgggcaggcgtgctatattactcgggttcgtggccgtctcgttccgtccaagcatgcagagtggcgtgtccttccttggcggaatggcggaggagtgcccaaccgctggcggcgcggagctctggcttcccgacgagttcttggatgatgacttcttctctgaggaggagaaggcggcggtcgcggccaagagcgagagcgacgaggaggaaggggtggacggcctctcgcgccgcgtggctgggctcgtcgtcggcaacgggaagggtggaggagacggttcccctgcaaaggcggaagtgctggccggctcgccgcagtcgattctgtgcggcctgcatgcttctggggaggacagccccaacggcgtggcgtcgcaggtcagctcgccgccgtcgtcgccgctggagcaggcgccggcggatccctgggacctgctgagcgaggcggccggccaggtggctcgcttgcgcacaaccagcatccccgtgccaacgaacgcggccgccaatcaaggagaccccgtcatggcaccgccagcaaagaagctctccgcgccgaccgaggctccgaaccacgcgggtgccaaccactctcagccgattaataactcgatggaacagcgccggattcaaattgctcgttttaatgccctgaagcagcagcagcttctcaagcaccggcgggagcgggagctcgccgtcgctacggcggcggcgtggggcaccagggtcgctgggtctcatcgtgccggtgccgccgccgggtacggtgcgccggcgtcacatgtcctcagcgcgtccgcgtggcccccgctcaagaagtcgcagccgcagccgccggcgtccccggcggcgggcatgcgcgccctcttcctcacccctcccggcgccaagcgtgagtgcgccggcaccggcgtgttcattccccgccaggccggcgcccccgccgagcccaagaaaaagccagcgtgctcccctgttcttctcccggcgcgcgtcgtgcaggcactcaacctcaacgtcgaggatctcggtgctcgtcccatctaccccggcggtttcgttcttgatcacgatgcactggtgagtcggagcaacgctctgctggcgagccgttcgtcccagctccatggcgcctcatcgcgcgaggtgaatctcccccaggaatggacgtattgacttgccgaatccggtcaccgctgcaaagatgatcccttccccagattaacgggtcatattcaaggaaaaaaaagagattactattgctgttgctagcaataggtaggtgttaggctagaagtaggaggcagcagcggtggtagcattatgcatcgtgcatcatcagcgttaggtgttcttttgtgcgggtgatatattggttattttgggggtgatggttggtgatggatgggagccgatgaacaagagcgaaatccatggctgtcgcaggtcgttggggggaggaacaataagtgggtgcttttggagaactactcctatggtttagctggttctcgtactatgatgatgatgatgattcccaagaaaaatcatcagcagtctgtttgtgaaagagatgcgtcagtgtaagcaagaagaaataataagagctccatatttcctt

SEQ ID NO: 4719 - DNA, 1921 bp, Zea mays
ctcacctccctccactccgcaaggcctctcgccgtccttctccttcgacattctcgctgcgctggccgcctgcccccccctctccgtccgtaagctttggccggggcagataacaaaatctgatatccctggggcttcgctgcgccgggtcccctaccttctcacctcacgcaaagcagaagggggaggagttttaggaggtggcaagaggagccatcatcgtgtccgtccgtgctgcccattattgtttcttcttccagcggcaatttctggccacagtggcgggcgctatattactcacaggttcgtggccggtcccggtccgtccgagcaagcagagcggcgtgtcgttcatggcggaggagtgcccgcccactggcggcggcgtggagctctggcttccggacgagttcctggacgacgattttttctccgaggaggagaaggcggcggtcgccgccaggagcgagaacgacgacgaggaggaaggggctgacggcctcccgcgccgcagggctgggctcgtcgtcggcaacgcgaagggccagggggacggttcccctgcaaatgcggaggtgttggccggctcgccgcagtcgattctgtgcggcctgcaggactatggggaggacagccccaacggcgcggcgtcgaaggtttgctcgccgccgtcgtcgccgctggagcgcccgccggcggatccctgggacgttcttaaagaggcggctggccaggtggctcgcctgcgcacaaacagcacccccgtgccaacgaacgacgctgccgccaaccaaggactccccgtcacgccgccggcgaagaagctctccgcgccggcggagactgcgaaggccaaccactcccagccgccgaataactcggtggaagagcgacggattcagattgctcgttttaatgccctgaagcagcggcagctcctcaagcaccggcgggatcgggagctcgccgtcgccacggcggcggcgtggggcaccagtgttgctgggtctcatcgtgccgctgccgccgccgccggcgggtacggtgcgccggcgccggcgccggcgccacgtgtcctgagctcgtacgcgtggcccccgctacagaagcagcggcaggcgccggcgtccccggagggcgtgcgcgccctcttcctcgcccctcctcctggcgccacgcgcgagtgcgccggcaccggcgtgttcatccctcgccaggccggcgcccccgctgagcccaagaaaaggccagcgtgctcgcctgttcttctcccggtgcgcgtcgtgcaggcactcaacctgaacgtcgtggacctcggagcccgtcccatctaccctggcggtttcgttctcgatcacgatgcgctggtgagtcggagcaacgccctgctggcgagccgtccgtcccagctccaccatggcgcctcctctcgcgaggtgaatctcccccaggaatggacgtattgaaagcgccgaatcggcaccgctgacgatctcccctaggttgacgggtcatatttgagacaaaaattactgtcgctaatgctagggataggtaggaaggggtagcgtttgctcgcgtgggttagagcgagagtgtgcatagttgtttgactaggaagttggaggcagcaggggttgcatcatcttttgcggtgcagaaacgcatcaggctctcttgcttcttttgttcccgttgcttcaagggtaaggaatctccatctccaggacagaaatagaaccaaccacagtaggagtactaccactccagttttggctgcggcttcatcgttttttatgattgttggagtgcttggttcggttcggcgtggttggagttgggtgcaggaagaacaacaggtgggttgtttcagtgtacttcttgtgagtctagttgcattaacttgacggcttgtgtgccc

SEQ ID NO: 4720 - DNA, 1860 bp, Sorghum bicolor
atgtttgacggcgccgtggcggtgaagcggatgaggctgtgggaggaggacgaggtggaggtggaggaggaggggatggaggtggacgcggaggcggggtggccgcagtggggggcgccggcggcggcagcggcggcggggctcggggagcccagggcggcggcgatcgtcgtggcggacgcgtcggaggtcgacttccccgtcatctacgtcaacgccgccttcgaggccgccacggggtaccgcgcgcacgaggtgctcggccgcaactgccgattcctacaatttcgggatccacgtgcccaaaggcgacatccccttgttgatcccatggttgtttcagagattcggcgatgcctcaatgaggggattgaattccaaggcgagctgctgaatttccggaaggacggtgctccactttacaacagattaaggctcattcctatgcatggggatgatggctatgtgacacatgttattgggatccagctattctctgacgcaaacatcgatctcagcagcgtatcatatccggtgtataagcaacagtccaacaggctgagcattcaagatctgaactcagcttctcatgagcatgctccgaaaatccagagttctgaccactgtgctatatttcaattgtcagatgaagttcttgcacacaacatcctatctcgcctgtcaccaagagatgttgcatccattggatcagtctgtaccagaatgcatgagctaaccaaaaacaatcatctgaggaagatggtctgccagaatgcatggggaagggatgtcactgtcaggcttgagatgagcaccaagatggtaggatggggtcgtcttgcaagagagttaacaactcttgaggcagcctcatggaggaagttcacagttggagggcgcgttgagccttcccgatgcaatttcagtgcctgtgctgttggtaaccgtcttgtcctttttggaggggaaggtgtcaacatgcagcctatggatgacacgtttgtgcttaacttggaggctgcaaggccagaatggcgccgcgtcaaggtttctgcctccccgcctggccggtggggccacactctatcatggctgaacgggtcatggctggtagtatttggaggctgcggacagcaaggtttgctcaacgatgtctttgtccttgaccttgatgctcagcagccaacgtggagggaggttgcaagcgaggctcctccactgccacggtcttggcacagctcatgcaccctggatggttcgaagcttgtcgtctcaggtgggtgcaccgagtctggtgttcttctcagcgacaccttcctccttgacctcacaaaggagaagcctgcatggagggagattcctacatcctggtcgcctccatcccgcctcggccacaccatgtctgtctatggtacaactaaactgttcatgtttggtggactggcaaagagcggctcgctccgactgcgctccagcgacgcctactcgattgatgtcagtgaagatagtccgcagtggagacagttggcgacgactggattcccaaatgtcggcccgccaccaaggctcgatcacgttgcagtgagcctgccctgtggacggatcatcatatttgggggctccattgcggggctccactccccagcgcagctgttcctgatcgatcccgcagaggagaagccgacatggaggatcctgaacgtacctggccagccccccaagttcgcctgggggcacagcacctgcgtggttggcggcaccagggtcctggttctcggaggccacactggggaggaatggatactgaacgaactacatgagctctgcctagcaagcaggcccgacgaagacgacgactga

SEQ ID NO: 4721 - DNA, 2267 bp, Zea mays
acccaaccacggacgcacgccgaggagggagaaagcgggtgtggaggggcgggcggccggcctcgcatgtttgacgacgcgggggccgtggcggtgaagcggatgaggctgtgggaggaggacgaggtggaagtggaggaggaggggatggaggtggacgcggagccgggatggccgtggggaacgccggcggcggggctctccagggctgcggcgatcgtcgtggcggacgcggcggagcccgacttccccgtcatatacgtcaacgccgcattcgagtccgccacggggtaccgcgcccacgaggtgctcgggcgcaactgccgattcctgcaatttcgggatccacgagcccagaggcgacatccccttgttgatcccatggtcgtttcagagatccggcgatgcctcaacgaggggattgaattccatggcgagctgctaaatttccggaaggatggcgctccactttacaacagattaagtctcattccaatgcacggggatgatggctacgtgacacatgtgattggaatccaactattctccgaggcaaacatcgatctcagcagcgtgtcgtatccggtgtacaagcaacagaccaacaacaggcccagcattcaagatctgaactcagcttcccatgagcatgctccgaaagtccagagtgcagaccactgcggtatacttcagttgtcagacgaagttctcgcacacaacattctgtctcgcctgtcacctagagatgtcgcatccattggatccgtctgtaccaggatgcatgagcttaccaagaatgatcacctgaggaagatggtctgccagaacgcgtggggaagggatgccactgtcaagcttgagatgagcaccaagatggtaggatggggccgtcttgcgagagagctaactactcttgaggccgcctcgtggaggaagttcacggttggagggcgcgtcgagccttcccgatgcaacttcagtgcctgtgctgttggtaaccgcttggtccttttcggaggggagggtgtcaacatgcagcctatggacgacacctttgtgcttaacatggaggctgcaaggccggaatggcgccgcgtgaaggtttccgcctccccaccaggccggtgggggcacactctgtcgtggctgaacgggtcatggctggtggtatttgggggctgcggacagcaaggtttgctcaatgatgtcttcgtccttgaccttgacgctcagcagccaacgtggagggaggttgcaagcgagggtcctccactgccacggtcctggcacagctcatgcaccttggatggttcgaagctggtcgtctccggtggctgcaccgagtctggcgttctcctcagcgacaccttcctgcttgacctcaccaaggagaagcctgcgtggagggaaattcccacatcttggtcacccccatcccgcctcggccacaccatgtccgtctacggtacgactaaactgctcatgttcggtgggctggcgaagagcggctcgctccggctgcgctccagcgacgcctacacgatggacgtcggcgaagatagtccgcagtggaggcagctggcgacgaccggattcccaaacgtcggcccaccgccgaggctcgatcacgttgcggtgagcctgccctgtggacggatcatcatattcggtggctccatcgcgggactccactccccggcgcagctgttcctggtcgatccagcagaggagaagccgacgtggaggatcctgaacgttcccggcaaaccccccaagttcgcctgggggcacagcacctgcgtggttggcggcactagggtcctcgtcctcggaggccacaccggggaggagtggatactgaacgagctacatgagctctgcctggcaagcaggcccgacgacgacgacgatgaccgctactgactagtttcgttgcacatggttcatctgttttatatgctatatgctattgttcgtaactacttccagtatgttgttgggtaatcggtatgagaaaaaatagtggaaaattaattaaaaaagttagactagaagattttagtgtattttgttttcatcggagaagtttccttttatcggtctagatagattctatggtctatatatttgtatattttttgtctaaaagatcaaaaaaaactgaaacaactgcattgtagattcgcatggcaaagtcgccagttccaatgtcttgtactcttatttttaatcatatgtaaaatatagcgctgcttcagtttgtaggt

SEQ ID NO: 4722 - DNA, 2190 bp, Oryza sativa Japonica Group
accgtctcatcccagctcagctcagctctgcctccgccatttcgaagcacatcgaggagagagaaagttctagagagagaggagagaggagagatgtttgatgcgggggatcgcggcggaggcggcggggtggtggcggtgaagaggatgaagctgtgcgaggaggaggaggaggaggaggaggggatggaggtggatgaggaggaggaggaggtggggtgggtgtggaggccgccgggggggctagcgggggaggatgaggcggcggcgtgggaggggagggcggcggcgatcgtggtgtcggacgcggtggaggtggatttcccggtcatctacgtcaacgccgccttcgaggccgccacggggtaccgcgccgacgaggtcctcggccgcaactgccgattcttacaattccgggatccacgtgcccaaagacgacatccgcttgttgatcccatggttgtttcagagatccggcgatgcttgaatgagggaattgagttccaaggtgagctattgaattttcggaaggacggtgctccactgtacaacaggctaaggctcattccaatgcatggggatgatggttttgtgactcacgtcattggaatccagttgttctctgaagctaacattgatcttagcaatgtatcatatccagtgtataaacaacagtccaaccacagacccaacattcaagagatcaaccctgcttctcatgaacatattcctaagattcaaagttccgagtactgctgcatcctccagctctcagatgaagttctggcgcacaacatattgtctcgcttatcgccaagagatgttgcatccatcggatcagtctgcactagaatgcatgagttgaccaagaatgatcacctgagaaagatggtatgtcaaaacgcgtggggaagagacgtcactgtgaggcttgagatgagcaccaagatgttaggatggggtcgtcttgcaagagagcttacaacccttgaggcagcttcatggaggaagtttacagttggaggtcgtgttgagccttcccgttgcaacttcagtgcctgtgctgttggtaatcgccttgtcctgtttggaggtgaaggagtcaacatgcagccaatggatgatacctttgtgctcaacctggaatctgcaaagcctgaatggcgccgtgtcaaagtttcagcttctccacccggccggtgggggcacactctctcatggctgaatggctcatggctagtggtctttggaggctgtggacagcaaggtttgctcaatgatgtctttgtccttgaccttgatgccaagcagcccacctggagggaggttgcaagcgagggcccaccattgccgaggtcatggcacagttcatgtaccctggatggatcaaagcttgttgtctcaggggggtgcactgaatccggtgtgctcctcagtgacacattcctgcttgacctcaccaaggaaaaaccagcatggaaggagatcccaacatcctggtcaccaccatcccgcctcggccacaccttgtccgtctttggtaagaccaaactcttcatgtttggtgggttggcaaagagcggctctctccggctacgctcctgtgatgcctacactatggacgctggtgaagacagcccacaatggaggcaactggcgacaaccgggttcccgagcatcggtccacctccgaggctcgatcatgtcgcggtcagcctcccctgtggacggataatcatattcggtggctccatcgctgggctgcactcgccctcacagctgttcctcctcgacccagcggaggagaagccgacatggaggattttgaacgtccctggccagccacccaagttcgcctggggtcatagcacatgcgtggttggcggcaccagggttcttgtcctgggtggccacactggggaggagtggattctcaatgagctccatgagctgtgcctcgcgagcaggcccgacgaagatgagtgattcccaactccattgcttgttcttatttatttagatcctatgattattactgatatctgttgttgtcacaaccctatgtaatagtagtaaaaaagaaacaaaaagaggattactggtagttttcatccttagaagttaggaaaaagatctgaaaaaaaagttatgaaataaaggtttgttctagtttttttttttgttttcttc

SEQ ID NO: 4723 - DNA, 2157 bp, Hordeum vulgare subsp. vulgare
gagagtgagcgaggcatgtttgatggggtggatcgcggcgccctcgtgacggtcaagcggatgaggctgtgcgccatggaggaggacgaggaggaggtggggatggaggtggacggggaagaggaggaggaggggaccggtgggtgggcctggggagcgccggggctggggatggcaggccagcctggagagcagagggcggcggcgatcgtggtggcggacgcggtggagccggacttccccgtcatctacgtcaacgccgccttcgaggccgctacggggtaccgcgcgcacgaggtcctcggccggaactgccgattcctacaatttcgggagccacgtgcccaaagacggcatccccttgtcgatccaatggttgtttcagagatgcgacgatgcctcagtgatggaattgaattccaaggtgaactactgaattttcggaaaaatggagctccagtaaacaaccgattgaggctgattccaatgcatggggatgatggagcttttacacacataattgcgatccagttgttctctgatgctaacatcgatcccagcaacatatcttacccaatatataaaccacagtccagccacaggctcagcatacaagatatgaatcgagcttctcatgaaactagtcctaaagtccaatgttcagaatactgcgctatcttccaactctcggatgaagttctagctcataacattttatctcgcctgtcaccaagagatgtagcttcagttggatcagtctgcactagaatgcatctgctgaccaagaatgatcttctgagaaaaatggtttgccaaaatgcatggggaagagatgtcactggcaggcttgagatgagcacgaagatgttaggatggggtcgtcttgcaagagagctaacaactctcgaggcagcctcttggaggaagttcacagttggaggacgcgttgagccatcccgatgcaattttagtgcctgtgctgtgggcaaccgcctcgtcctttttggcggggagggggtcaacatgcagcctatgagtgacacctttgtgcttaaccttgatgctccaaagccagaatggtgccgtgtcaaggtttctgcctcaccacctggccgctggggacatactctctcatggctaaatggctcatggctggtagtatttggaggttgcgggcagcaaggtttgcttaatgatgtcttcgtccttgatcttgatgctcagactcccgcttggagggagattgctagcgacggtccgccactgccacggtcttggcatagttcatgcaccctggacggttctaaacttgttgtgtcaggggggtgtgccgagtccggtgtgctcctaagcgacacattcctgcttgacttgacgaaggagaagccagcatggaaggagatcccgacatcctggtcatcccgccttggccataccttgtctgtttatggtaagactaaaatatttatgtttggtggattggcaaagagtggctcgctccgactgcgctccagtgatgcctacataatggatgttggtgaagagaatccacaatggaggcagttggcaacaactgtgtttccaagcggttgtccaccaccaaggcttgatcatgtcaccgtgagcctgccctgtggaaggatcatcatatttggcggctcaatcgctgggctgcactcacccgctgagctcttcttgcttgatccggctgaggaaaaaccgacatggagaatcctgaacgtcccggggcagccacccaagttcgcttggggacacagcacctgcgtggttggtggcactagggtcttggttcttggtggacacagcggagaggagtggatcctgaatgagctccacgagctctgcctcgcaagcaggcccgacgaagatggatgattatgtcgacgtcccatgtagagttatcatgatttagaccttaccttcatttcatctccctctcagcttttcttacaaaaatgagtgcaaaagaatctaaaaggagtttgtggacgagagttttagtataccttgttgttctcatatgatacggccatatcttagataaggctggaaatccctatactacagttagtttgttggttgtaaatgcgtgggtatcacccggaatttaatttggctttcgggagcatttgcttc

SEQ ID NO: 4724 - DNA, 1881 bp, Triticum aestivum
atgtttgatggggtggatcgctgcgccgtcgtggcggtcaagcggatgtggctgtgcgccatggaggaggaggtggaggaggggatggaggtcgacggggaagaggaggaggaggaggggaccggtgggtgggcctggggagcgccggggctggggatggctggccagccgggagagcagatggcggcggcgatcgtggtggcagaygcgstggagcykgayttscccgtcatctacgtcaacgccgccttcgaggctgccacggggtaccgcgcgcacgaggtccttggccggaactgccgattcctacaattttgggacccacttgcccaaagacgacatccccttgtcgatccaatggttgtttcagagatgcgacgatgcctcagtgatggaattgaattccaaggtgagctactgaattttcggaaaaatggcgctccactgaataaccggttaaggctcattccaatgcatggggatgatggcgcttttacacacataattgcgatccagttgttctctgatgctaacatcgatcccagcaacatttcttacccagtatataaaccacagtccagccacaggctcagctttcaagatatgaaccggacttctcatgagcatactcctatagtccaatgttcagagtactgcgctatcttcaacctctcggatgaagttctagcttataacattttatctcgcctgtcaccaagagatgtagcttcagttggctcagtctgcactagaatgcatctgctgaccaagaatgatcatctgacaaaaatggtctgccaaaatgcatggggaagagatgtcactggcaggcttgagatgagcaccaagatgttaggatggggtcgtcttgcaagagaactaacaactctcaaggcagcctcttggaagaagttcacagttggaggacgcgttgagccatcccgatgcaattttagtgcctgtgctgtgggcaaccgcctcgtcctttttggcggggagggggtcaacatgcagcctatgagtgacacctttgtgcttaacctggaggctccaaagccagaatggtgccgtgtcaaggtttctgcctccccacctggccgctggggccacactctctcatggctaaatggctcatggctggtagtatttggaggttgcggacagcaaggtttgcttaatgatgtcttcgtccttgaccttgatgctcagactcccgcttggagggagattgctagcgacggtccgccactgccacggtcctgrcatagttcatgcaccctggacggttctaaacttgttgtgtcaggggggtgtgccgagtccggtgtgcttctaagcgacacattcttgcttgacttgacgaaggagaagccaacatggaaggagatcccgacatcctggtcgtcgcgccttggccataccttctctgtttatggtaagactaaaatatttatgtttggtggattggcaaagagtggctcgctccgactgcgctccagtgatgcctacataatggattttggtgaagagaatccacaatggaggcagttggcgacaactgggtttccaagcgttggtccgccgccaaggcttgatcatgtcaccgtgagcctgccctgtggaaggatcatcatatttggcggctcaatcgccgggctgcactcaccagctgagctcttcttgcttgatccggctgaggaaaaaccgacatggagaatcctgaatgtccctgggcagccacccaagttcgcttggggacacagcacctgcgtggttggtggcactaggatcttggttcttggtggacacaccggagaggagtggatcctgaatgagcttcacgagctctgcctctcaagcaggcccgatgaagatggatga

SEQ ID NO: 4725 - DNA, 2007 bp, Zea mays
cgggatggccgtggggaacgccggcggcggggctctccagggctgcggcgatcgtcgtggcggacgcggcggagcccgacttccccgtcatatacgttaacgccgcattcgagtccgccacggggtaccgcgcccacgaggtgctcgggcgcaactgccgattcctgcaatttcgggatccacgagcccagaggcgacatccccttgttgatcccatggtcgtttcagagatccggcgatgcctcaacgaggggattgaattccatggcgagctgctaaatttccggaaggatggcgctccactttacaacagattaagtctcattccaatgcacggggatgatggctacgtgacacatgtgattggaatccaactattctccgaggcaaacatcgatctcagcagcgtgtcgtatccggtgtacaagcaacagaccaacaacaggcccagcattcaagatctgaactcagcttcccatgagcatgctccgaaagtccagagtgcagaccactgcggtatacttcagttgtcagacgaagttctcgcacacaacattctgtctcgcctgtcacctagagatgtcgcatccattggatccgtctgtaccaggatgcatgagcttaccaagaatgatcacctgaggaagatggtctgccagaacgcgtggggaagggatgccactgtcaagcttgagatgagcaccaagatggtaggatggggccgtcttgcgagagagctaactactcttgaggccgcctcgtggaggaagttcacggttggagggcgcgtcgagccttcccgatgcaacttcagtgcctgtgctgttggtaaccgcttggtccttttcggaggggagggtgtcaacatgcagcctatggacgacacctttgtgcttaacatggaggctgcaaggccggaatggcgccgcgtgaaggtttccgcctccccaccaggccggtgggggcacactctgtcgtggctgaacgggtcatggctggtggtatttgggggctgcggacagcaaggtttgctcaatgatgtcttcgtccttgaccttgacgctcagcagccaacgtggagggaggttgcaagcgagggtcctccactgccacggtcctggcacagctcatgcaccttggatggttcgaagctggtcgtctccggtggctgcaccgagtctggcgttctcctcagcgacaccttcctgcttgacctcaccaaggagaagcctgcgtggagggaaattcccacatcttggtcacccccatcccgcctcggccacaccatgtccgtctacggtacgactaaactgctcatgttcggtgggctggcgaagagcggctcgctccggctgcgctccagcgacgcctacacgatggacgtcggcgaagatagtccgcagtggaggcagctggcgacgaccggattcccaaacgtcggcccaccgccgaggctcgatcacgttgcggtgagcctgccctgtggacggatcatcatattcggtggctccatcgcgggactccactccccggcgcagctgttcctggtcgatccagcagaggagaagccgacgtggaggatcctgaacgttcccggcaaaccccccaagttcgcctgggggcacagcacctgcgtggttggcggcactagggtcctcgtcctcggaggccacaccggggaggagtggatactgaacgagctacatgagctctgcctggcaagcaggcccgacgacgacgacgatgaccgctactgactagtttcgttgcacatggttcatctgttttatatgctatatgctattgttcgtaactacttccagtatgttgttgggtaatcggtatgagaaaaaatagtggaaaattaattaaaaaagttagactagaagattttagtgtattttgttttcatcggagaagtttccttttatcggtctagatagattctatggtctatatatttgtatattttttgtctaaaagatcaaaaaaaactgaaacaactgc

SEQ ID NO: 4726 - DNA, 1528 bp, Oryza sativa Japonica Group
atggttgtttcagagatccggcgatgcttgaatgagggaattgagttccaaggtgagctattgaattttcggaaggacggtgctccactgtacaacaggctaaggctcattccaatgcatggggatgatggttttgtgactcacgtcattggaatccagttgttctctgaagctaacattgatcttagcaatgtatcatatccagtgtataaacaacagtccaaccacagacccaacattcaagagatcaaccctgcttctcatgaacatattcctaagattcaaagttccgagtactgctgcatcctccagctctcagatgaagttctggcgcacaacatattgtctcgcttatcgccaagagatgttgcatccatcggatcagtctgcactagaatgcatgagttgaccaagaatgatcacctgagaaagatggtatgtcaaaacgcgtggggaagagacgtcactgtgaggcttgagatgagcaccaagatgttaggatggggtcgtcttgcaagagagcttacaacccttgaggcagcttcatggaggaagtttacagttggaggtcgtgttgagccttcccgttgcaacttcagtgcctgtgctgttggtaatcgccttgtcctgtttggaggtgaaggagtcaacatgcagccaatggatgatacctttgtgctcaacctggaatctgcaaagcctgaatggcgccgtgtcaaagtttcagcttctccacccggccggtgggggcacactctctcatggctgaatggctcatggctagtggtctttggaggctgtggacagcaaggtttgctcaatgatgtctttgtccttgaccttgatgccaagcagcccacctggagggaggttgcaagcgagggcccaccattgccgaggtcatggcacagttcatgtaccctggatggatcaaagcttgttgtctcaggggggtgcactgaatccggtgtgctcctcagtgacacattcctgcttgacctcaccaaggaaaaaccagcatggaaggagatcccaacatcctggtcaccaccatcccgcctcggccacaccttgtccgtctttggtaagaccaaactcttcatgtttggtgggttggcaaagagcggctctctccggctacgctcctgtgatgcctacactatggacgctggtgaagacagcccacaatggaggcaactggcgacaaccgggttcccgagcatcggtccacctccgaggctcgatcatgtcgcggtcagcctcccctgtggacggataatcatattcggtggctccatcgctgggctgcactcgccctcacagctgttcctcctcgacccagcggaggagaagccgacatggaggattttgaacgtccctggccagccacccaagttcgcctggggtcatagcacatgcgtggttggcggcaccagggttcttgtcctgggtggccacactggggaggagtggattctcaatgagctccatgagctgtgcctcgcgagcaggcccgacgaagatgagt

SEQ ID NO: 4727 - DNA, 2048 bp, Glycine max
  misc_feature (1811)..(1812): n is a, c, g, or t
atggtggattattacaaggctgtgacaaaagataaagaggatgttcggaacactgggaagagattgaaatgcatgaggaatgaagaagaagaagtttatgaagaagaagagagtgagcttcctttaaagccaggatttttcttctacccaacaacacccacttcctttgttgtatctgatgctcttgaacccgattttcccatcatatatgtcaacaaggtctttgaaatctccactggatatcgtgctgacgaggccctcggtcgcaattgtcggttcttacagtatagagatcctcgagctcagaggaggcaccctttggtggatcctgttgttgtgtctgagattagaagatgcctcgaggaaggtgttgagttccaaggtgaacttctgaatttcagaaaggatggtactcctttggtgaacagactgagacttgcgccaattcatgacgatgatggaactgtgacacatgtgataggtatccaactcttttctgaggcaaatatagatctgaaccgtgtctcatatccagtcttcaaagagacttgcaatcaagattttgataagactggtaaatataatcctaagagtggacaatcattgtacagtcagcaccaagagatgtgtggcattcttcagctttctgatgaagtcttggctcacaacattttgtcacgcttgacaccgagggatgttgcatccattgggtctgtatgcaggaggatccgtcaattaacaaagaacgagcatgtcaggaagatggtatgtcaaaatgcgtggggcaaagaagtgacgggcacattggaactgatgaccaagaagttaggatggggtcgtctgactcgggaacttaccactctcgaagctgtttgttggagaaaactgacagttggaggtgcagtggagccttcacgctgcaatttcagtgcttgtgctgcaggaaaccgacttgtattgtttggaggtgaaggagtggatatgcaacctatggatgacacttttgttctaaatcttgatgctaaaaatccagaatggcgcagggttagtgtgaaatcatcccctcccggaaggtggggccacacgctctcatgcttaaatggttcttggttggtggtttttggtgggtgtggtaggcagggattgctcaatgatgtgtttgtgcttgatttggatgctcaacagccaacatggagggaggtttgtggtggaacaccaccacttcctagatcatggcatagctcttgcacaattgaagggtccaaattggttgtctccggcgggtgcacagatgctggggtacttcttagtgacacatatttactggacctcacaacagataatccaacatggagagaaattccaacttcatgggctcctccttctcggttggggcactcactctcagtctatgggaggactaagattctaatgtttggaggacttgccaagagtggacacttgcggctacgatcaggcgaggcttatacaattgacttagaagatgaacaaccacaatggaggcaactagaatatagcgcattcacagggttagcgagtcaaagtgctgttgttcctcctcctaggctggatcatgttgctgtcagcatgccttgtgggaggatcattatatttggaggttccattgctggtcttcactcaccatctcagctctttctgttggacccctctgaagaaaaaccatcctggaggatcctcaatgttcctgggcaaccgccgaaatttgcttggggtcatagcacttgtgtggttggagggacaagggtgttggtgttgggtggacacactgnngaggaatggatactgaatgagttgcatgagttatgcttggcaagtcgacaggactctgacctgtgaagtgcataaaaccagaccctcttctctcaagacaagattttggttgcaaaaaggttttgggtggctttcctttagcagtttggtttttgtatatgagccactattacatgattgttatatgaaatgacgtgtgtattaccagtgtttttgaatgatatatgatgtcatct

SEQ ID NO: 4728 - DNA, 944 bp, Zea mays; identical to SEQ ID NO: 1585

SEQ ID NO: 4729 - DNA, 922 bp, Zea mays
gcaaaataccactcgagcacaattcaagcagcagcgaaggtagccacaacatccactctactactggagagctaagaaatcgttcaacaggtgatccagaacaagatgtgtccgaccaagaaggagatgagtgccgattcgtcgggctcggcgagcagctggacttcgccggagcaccagaccgtgtggacttcgccgaagcggcccgcggggcggaccaagttccgcgagacgcggcaccccgtgttccgtggcgtccggcgccgcggcagcgccgggcggtgggtgtgcgaggtgcgcgtgcccgggaggcgcgggtgcaggctctggctcggcacgttcgacgccgccgaggccgccgcgcgcgcgcacgacgccgccatgctcgccatcgccggcgcgagcgcgtgcctcaacttcgccgactccgcgtggctgctcgcggtccccgcctcgtacgccagccttgccgaggtccgccgtgcggtcgccgaggccgtggaggactttcagcgccgcgaggcggccgccggggacgacgcgcgctcggccacatcgccggcgccgtccacctcgggcaccgacgacgacgctaccactgacggcgaggagtcgtcaccggccacggaagactcgtcgttccagctcgacgtgttcgatgacatgagctgggatctatactacgcgagcatggcgcagggaatgctcatggagctgccgtccgcagttccggcgttcggagacgacggctacaccaatatcgccgatgttccactgtggagctactagaattgaggacgttgataccttgaatttctcttctttttcctgttggctccccatgccaaattttgggactaggtaatgaaaacagagcaagtttggaaaaggaaaacagaggatgaaaaaaaaaaaaaaaaaa

SEQ ID NO: 4730 - DNA, 723 bp, Sorghum bicolor
atgtgtccgccgatcaagaaggagatgagcgccgagtcgtcggcctcagcctcggcctcgccctcggcctcgtcggagcaccagaccgtgtggacgtcgccgccgaagcggccggcggggcggaccaagttccgcgagacgcggcaccccgtgttccgcggcgtccggcgccggggcaacgccgggcggtgggtgtgcgaggtgcgcgtgccggggaggcgcggctgcaggctctggctcggcacattcgacaccgccgaggccgcggcgcgcgcgcacgacgccgccatgctcgccatcgccggcgcgggcgcgtgcctcaacttcgccgattcggcttggctcctcgcggtcccggcctcgtacgccagcctcgccgaggtccgccacgcggttgccgaggccgtagaggatttccagcgccgcgagggcgagggcgaggcggccgccggggaggacgacgcgcgctcggccacctcgtcgtcagtgccgtccacctcatcgggcaatgaggacgacgccgctgccactgacggcgaggagtcttcgccggccacggaggactcgtcgccgttcgagatggacgtgttcaatgacatgagctgggatctgtactacgcgagcatggcgcaggggatgctcatggagctgccgtccgcagttccggcgttcggggacgacggctacgccaatgtcgccgatgtgccactgtggagctactag

SEQ ID NO: 4731 - DNA, 920 bp, Oryza sativa Japonica Group
atcgccattaccacactcgagcagagcaaatacagttcaggaatcaggagcaagcagaaacacacacacaaatccgaagatgtgcgggatcaagcaggagatgagcggcgagtcgtcggggtcgccgtgcagctcggcgtcggcggagcggcagcaccagacggtgtggacggcgccgccgaagaggccggcggggcggaccaagttcagggagacgaggcacccggtgttccgcggcgtgcggcggaggggcaatgccgggaggtgggtgtgcgaggtgcgggtgcccgggcggcgcggctgcaggctctggctcggcacgttcgacaccgccgagggcgcggcgcgcgcgcacgacgccgccatgctcgccatcaacgccggcggcggcggcggcgggggagcatgctgcctcaacttcgccgactccgcgtggctcctcgccgtgccgcgctcctaccgcaccctcgccgacgtccgccacgccgtcgccgaggccgtcgaggacttcttccggcgccgcctcgccgacgacgcgctgtccgccacgtcgtcgtcctcgacgacgccgtccaccccacgcaccgacgacgacgaggagtccgccgccaccgacggcgacgagtcctcctccccggccagcgacctggcgttcgaactggacgtcctgagtgacatgggctgggacctgtactacgcgagcttggcgcaggggatgctcatggagccaccatcggcggcgctcggcgacgacggtgacgccatcctcgccgacgtcccactctggagctactagagctcaatcaactgtacaattttgcctcttttttctctcttttctggcttccgatgccaaaattttggtactgtacggacactactttcggtaatgtgatggaacaagttgcaaaacacagagc

SEQ ID NO: 4732 - DNA, 850 bp, Oryza sativa
cgagcagaggaaatacagtttaggaatccggagcaagcagaaacacacacacaaatccgaagatgtgcgggatcaagcaggagatgagcggcgagtcgtcggggtcgccgtgcagctcggcgtcggcggagcggcagcaccagacggtgtggacggcgccgccgaagaggccggcggggcggaccaagttcagggagacgaggcacccggtgttccgcggcgtgcggcggaggggcaatgccgggaggtgggtgtgcgaggtgcgggtgcccgggcggcgcggctgcaggctctggctcggcacgttcgacaccgccgagggcgcggcgcgcgcgcacgacgccgccatgctcgccatcaacgccggcggcggcggcggcgggggagcatgctgcctcaacttcgccgactccgcgtggctcctcgccgtgcggcgctcctaccgcaccctcgccgacgtccgccacgccgtcgccgaggccgtcgaggacttcttccggcgccgcctcgccgacgacgcgctgtccgccacgtcgtcgtcctcgacgacgccgtccaccccacgcaccgacgacgacgaggagtccgccgccaccgacggcgacgagtcctcctccccggccagcgacctggcgttcgaactggacgtcctgagtgacatgggctgggacctgtactacgcgagcttggcgcaggggatgctcatggagccaccatcggcggcgctcggcgacgacggtgacgccatcctcgccgacgtcccactctggagctactagagctcaatcaactgtacaattttgcctcttttttctctcttttctgccttccgatgccaaaatttttttaa

SEQ ID NO: 4733 - DNA, 786 bp, Sorghum bicolor
cacagctctagcaggaccgaccaaaggcacccgcaccatccgcggctcaagcaagcagagaagtgatcagaagagaagatgtgcccaatcaagaaggagatgaccggagagtcgagctccccctgcagctcagcctcgacctcttcggagcaccaccagacggtgtggacgtcgcgaccgaagcggcccgcggggcggaccaagttccgggagacgaggcacccggtgttccgcggcgtccggaggcggggcaacgccgggcggtgggtgtgcgaggtgcgcgtgccggggaggcgcggctgcaggctctggctcggcaccttcgacaccgcggacgccgcggcccgcgcgcacgacgccgccatgctcgccatcgccggcgcgggcgcctgcctcaacttcgccgactcggcctggctcctcgccgtgccggcctcgtacgccagcctcgccgaggtccgccacgccgtcgcggaggccgtggaggagttcctgctccgtgaggtggtccaagaggacgatgcgctttcggccacgtcctcgacgccgccgtcgtccccgtccagcagcgacgacggaagcacctctgatggcggggagtcctctgaatctgattcgtctccggccgccaccggggcctcgccgttcgaattggacgtgttcaatgacatgagctgggacctgtactacgcgagcttggcgcaggggatgctcgtggaaccaccgtccgcggtcaccgcgttcatggacgaaggcttcgccgatgtgccactatggagctactag

SEQ ID NO: 4734 - DNA, 1800 bp, Sorghum bicolor
ggttctactccgtgcggtgcggtgcggtgcggtgcgctttgctggtgtgtcctcgactcctcgtgcagcctcgctcgctggctgatcccaattcccacagggggccggggactggcggcggttgacggctgatagagttggcgcggagtgtgggtgatggcgtcggagccggtggcgcgggcggtggcggaggaggtggggcgatgggggagcatgaagcagacgggggtgaccctgaggtacatgatggagttcggctcccgccccaccccgcgcaacctgctgctctccgcgcagttcctgcacaaggagctccccatccgcttcgcgcgccgcgcgctcgagctcgagtcgctgcccttcggcctctccaacaagcccgccatcctcaaggtgcgggattggtacttggactcattccgcgacatcagatacttccctgaagtgaggagccggaacgacgagctcgctttcacacagatgatcaatatggtcaaaatgcggcacaataatgtggttccaacaatggctttgggagtgcagcagctgaagaaggaactgggccacgcaaggaaggttccctttgaattcgatgatcagatccacgagttccttgatcgtttctacatgtcaaggattggcatccgcatgctgatagggcagcatgtggctttgcatgatcctcaaccctctggtgtcataggcctcattaatacaagattatccccaatacaggtggctcaagctgcttgtgaagatgcccgtgctatttgcttaagggaatatggatcagctcctgatattaacatttatggtgatccaaattttacatttccatatgtcacacatcacctacatctgatgttatttgaattggtcaagaactctctccgtgcggtgcaagaacggtatatgaattctgatgaagatgttcctccagttagaattatagttgctgatggagaagaagatgttactatcaaggttagtgatgaaggtggcgggataccaagaagtggcctcccaagaattttcacgtatctgtatagcactgcaaagaatcctcctgagctagatagacctaatgtaggagtaactatggccggatatggtttcgggctcccaatcagccggctttacgctcggtattttgggggcgacttgcaaatcatctcaatggaaggatacggtaccgatgcttacctccacttgtcacggctgggagattcagaggagcccttgccttgacgacatatttctgtggcccccaataccactctttctcctgtaattatgctgctcttcttcttgtaatccagtgctggtctgcgaatattgttgtaataggccagccacctatagctatagttggtctcgatcttatagtccggcccctcagctctgcagcattggggaacacagcactgctacgtcctgcttgcttctgccatgtagtatgatctctctgccgggtttcagggggagaaaaatagagaatagtatgatccctccgtcgggtatcagaaaacagtatgatgatccctctgcctcccagaaaccagcgttgcaaatggggagaagcacccggacctatgccgatgagcacaaatttgagattattctcagcagctgctaatttcatagctgcatctcttgttgtacagtatataatctggatttgggctttgctacgctactccgtagcgacggtggactctcgatctttatggcaattatcacgtattaccttctaggaggtaatagagaaatataagaaaaatagagaattgtgttcctata

SEQ ID NO: 4735 - DNA, 1597 bp, Zea mays
cgtgtcctcgtggcttggcagtgtcgatcgctgatcccaccggctgatagagttggcggccgggagagtgagtcagggatggcgtcggagccggtggcgcgggcggtggcggaggaggtgggccgctggggcagcatgaagcagacgggggtgaccctgcggtacatgatggagttcggctcccgccccacccagcgcaacctgctcctctccgcgcagttcctgcacaaggagctccccatccgcttcgcgcgccgcgcgctcgagctcgactcgctgcccttcggcctctccaacaagcccgccatcctcaaggtgcgggactggtacttggactcattccgggacatcagatacttccctgaagtgaggagccggaacgacgagctcgctttcacgcagatgatcaatatggtcaaggtgcggcataacaatgtggttccaaccatggccttgggagtgcagcagctgaagaaggagctgggccgctcaaggaaggttccattcgagttcgatgagatcgacgagttccttgaccggttctacatgtcaaggattggcatccgcatgctgatagggcagcatgtggctttgcatgaccctaaaccggagcctggtgttataggcctcatcaatacaagattatccccaatccaggtggctcaagctgcttgtgaagatgcccgttctgtctgtttaagggaatatggatcagctcctgatattaacatttatggcgatccaaattttacgtttccatacgtcacattacacctacacctgatgttatttgaattggtgaagaactctctccgcgcggtgcaagaacggtatatgaactctgataaagatgttcccccggttagaattatagttgctgatggagaagaggatgttactatcaaggttagcgatgaaggtggcgggataccaagaagcggcctcccgagaattttcacgtatctgtacagcaccgcaaagaatcctcctgagctagatagacctaatactgaaggggtaactatggctgggtatggtttcgggctcccgatcagccgactctacgctcggtattttggcggcgacctgcaaatcatctcgatggaaggatacggtaccgatgcttacctccacttgtcgcggctgggagattcagaggagcccttgccttgacgacatatttttgtggacctccagtaccactcttctcctgtaactatgtggctcgatcttcttgtaatccagtgctggcctcgacctatatatatatagctatagttggcctcgaccttatttcactgcctgctctgctgcattgtgaacacagcactgctacgtcctgcttacttccgccatgtactatgatctctctgccggccttcaacaggaaaaaagaaaggacgagggaaatcatggggagcagctaggcggatgagcgcattctcggtagctgctaatctcattttcatagctgcgtctcttgtgttgtacattacatagtctggatttgagcttttgctatggcaagtatcacatgttacctgggtaattgagaaatataagtaaaaaaaacagtacgatgtctctctttagacgt

SEQ ID NO: 4736 - DNA, 1602 bp, Zea mays
ggcacgaggtggcttggcagtgtcgatcgctgatcccaccggctgatagagttggcggccgggagagtgagtcagggatggcgtcggagccggtggcgcgggcggtggcggaggaggtgggccgctggggcagcatgaagcagacgggggtgaccctgcggtacatgatggagttcggctcccgccccacccagcgcaacctgctcctctccgcgcagttcctgcacaaggagctccccatccgcttcgcgcgccgcgcgctcgagctcgactcgctgcccttcggcctctccaacaagcccgccatcctcaaggtgcgggactggtacttggactcattccgggacatcagatacttccctgaagtgaggagccggaacgacgagctcgctttcacgcagatgatcaatatggtcaaggtgcggcataacaatgtggttccaaccatggccttgggagtgcagcagctgaagaaggagctgggccgctcaaggaaggttccattcgagttcgatgagatcgacgagttccttgaccggttctacatgtcaaggattggcatccgcatgctgatagggcagcatgtggctttgcatgaccctaaaccggagcctggtgttataggcctcatcaatacaagattatccccaatccaggtggctcaagctgcttgtgaagatgcccgttctgtctgtttaagggaatatggatcagctcctgatattaacatttatggcgatccaaattttacgtttccatacgtcacattacacctacacctgatgttatttgaattggtgaagaactctctccgcgcggtgcaagaacggtatatgaactctgataaagatgttcccccggttagaattatagttgctgatggagaagaggatgttactatcaaggttagcgatgaaggtggcgggataccaagaagcggcctcccgagaattttcacgtatctgtacagcaccgcaaagaatcctcctgagctagatagacctaatactgaaagggtaactatggctgggtatggtttcgggctcccgatcagccgactctacgctcggtattttggcggcgacctgcaaatcatctcgatggaaggatacggtaccgatgcttacctccacttgtcgcggctgggagattcagaggagcccttgccttgacgacatatttttgtggacctccagtaccactcttctcctgtaactatgtggctcgatcttcttgtaatccagtgctggcctcgacctatatatatatagctatagttggcctcgaccttatttcactgcctgctctgctgcattgtgaacacagcactgctacgtcctgcttacttccgccatgtactatgatctctctgccggccttcaacaggaaaaaagaaaggacgagggaaatcatggggagcagctaggcggatgagcgcattctcggtagctgctaatctcattttcatagctgcgtctcttgtgttgtacattacatagtctggatttgagcttttgctatggcaagtatcacatgttacctgggtaattgagaaatataagtaaaaaaaacagtaaaaaaaaaaaaaaaaaaaaaaaaaaa

SEQ ID NO: 4737 - DNA, 1480 bp, Oryza sativa Japonica Group
ccaaatctcgccgccggtgaaggaggtagaagtggaggtggaggtggggggaggatggcgtcggagccggtggcgagggcggtggcggaggaggtggggaggtgggggagcatgaagcagacgggggtgagcctgcgctacatgatggagttcgggtcgcgccccacggagcggaacctgctgctctccgcgcagttcctgcagaaggagctcccaatccggatcgcgcgccgcgcgctcgagctcgagtccctccccttcggcctctcccgcaagcccgccatcctcaaggtgcgggattggtacttggactctttccgcgacatcagatactttccagaagtgaggaataggaacgacgagctcgcttttacgcagatgatcaagatgatcaaagtacgccacaataatgtggttccaacgatggcactgggagttcaacagctcaagaacgagcagtatcgcacaaggaagatccccactgcatttgacgagatccacgagtttcttgacagattctacatgtcaaggattgggatccgcatgcttatagggcagcatgtggctttgcatgatcctgacccagagcctggcgtcataggcctcattaatacagaattgtcccctatacaggtggctcaagctgccagtgaagatgcccgttctatttgtttgagggaatatggatcagctcctgagattgacatctatggagacccaacttttacatttccatatgtttcatcacatctacatctcatgctatttgaattggtgaagaactccttgcgtgcagtacaggaacgatatatgaattccgataaagatgttcctccagttagaattatcgttgctgatggggcagaggatgtaactatcaaggttagtgatgaaggtggtggaataccaaggagcggccttccaagaattttcacatatctatatagcactgcaaagaatccacctgatatggattgccctagtgaaggagtaactatggctggatatggctatggtcttccaatcagtcgcctgtatgctcgatattttggtggtgacctgcaaatcatctctatggaaggatacggcaccgatgcttacctgcacttgtcacggttgggagattcggaggagcccttgccttgaaggcttccctgtcctgataccatctctgtaattaattaggttgctcttgtctcttgtaattcctgggctggtttggaatattgttttcaagtgccagccacctatagctgttaaccttctacagtagttgccacggtttcatcacttcagctttgcagcagcatgagcacaagtctcctctctctctttctctctctctctactctgccttgtagcgaaatgtagaattcttctgccacgcacatggcattgttcatacttctcgtacttgttgagcttcatggcttggtgcagattgtactttgatagttatcagtagtaagctaacttcatc

SEQ ID NO: 4738 - DNA, 1333 bp, Hordeum vulgare subsp. vulgare
gagccacaaggcttctctcattcctgatgccaccttaattagccgcctgcccccccctaatcctccagtttgtacggcggttatccggctcgtcgtcggtgaccggcggcggcggcggagcgatgatggcgtcggagccggtggcgcgggcggtggcggaggaggtggggcggtgggggagcatgaagcagacgggggtgagcctgcggtacatgatggagttcgggtccgtccccacggaccgcaacctgctgctctccgcccagttcctgcacaaggagctccccatccgcatcgcccgccgcgcgctcgacctcgagtccctccccttcggcctctccgccaagcccgccatcctcaaggtgagggactggtacttggactcgttccgcgacatccgatatttcccagaagtgaggaaccgggacgacgagcttgctttcacgcagatgattaagatgatcaaagtgcggcacaataacgtggtgcctactatggctttgggagtgcaacagctgaaaaacgaacagttcagctcaaggaagcttcccccaggattcgacgagatccatgagttcctcgatcgattttacatgtcaaggattggtattcgcatgctcatagggcagcatgtggctctgcatgatcctgaaccagagcctggcgtcataggcctcatcaatacaaaattgtcccccatacaggtagctcaaattgctagcgaggatgcccgttccatttgtatgagggaatacggatcagctcctgacatcaacatttatggagatcgaaattttacatttccatacgtcgcatcgcatcttcatctcatgctgtttgaactggtgaaaaattcccttcgtgcagtacaggaaagatatatggattctgataaagatgttcctcctgtcagaattatagttgctgatggaacagaggatgttactattaaggtcagtgatgaaggtggtggaatacggagaagtgggctccctagaattttcacatatctttacagcactgcaaaaaatctacctgatatagagggccctagtgaaggagtaactatggctggatatggttttggacttccagttagtcgcctttatgcgcaatatttcggtggcgacctacaaatcatatccatggagggatacggcaccgatgcttacctccacttgtcacggctgggagactcagaggagccattgccttaatggcccctcctgttctgatacaatttctgtaattaggctgctcttgcttattgtaatccctgtgctggtttgcaaatattgtttcaagggccagccatatatagctgttaaaccac

SEQ ID NO: 4739 - DNA, 1590 bp, Sorghum bicolor
ctccgcttccgtcacacctcctccctcctcctcctcctcctcctcctgcggctgcggcccactacatataccatcatcacgtcgatgcgccgctccgctggcatcgccatcgccgtcgcgccgccgtagacggcctgacatttttttgtttatccctttatttatcatcccaatttcccacaaacccccccgcgcgcgcgcgcggcggtagggggtaaaaaacaaagagagggaaggatggcgtcggagccggtggcgcgggcggtggcggaggaggtggcgcgctggggcgcgatgcgccagaccggggtcagcctgcgctacatgatggagttcggggcgcgccccacggagcggaccctcctcctcgccgcgcagttcctgcacaaggagctccccatccgcatcgcgcggcgggcgctcgacctcgactcgctccccttcggcctctccaccaagcccgccatcctcaaggtgagagattggtatgtggagtcatttcgtgacatccggtccttcccagaggtgaggaaccgggaagatgagctcgccttcacccagatgatcaaaatgatcagggtgcggcacaccaatgtggtgcccgcaattgcattgggtgtgcagcagatgaagaaggacttgggaggtccaaaggcgttcccccctggaatccaggagatccatcagttccttgatcgcttctacatgtcaaggattgggatccggatgctgatagggcagcacgtcgctttgcatgaccctgatccagagcctggtgtgatagggcttataaacacaaaaatgtcacctatgacagtagctcgaattgctagtgaagatgcacgtgctatttgcatgcgggagtatggatcatctcctgatgttgacatatatggtgatccgggttttacatttccatatgttacaccacatctacatctcatgattttcgagttggtgaagaactcccttcgcgcggtacaggaacggtatatggattctgataagcttgcacctccagttcgaatcatagttgctgatggagcagaggacgtgactattaagattagtgatgaaggtggtggtataccaaggagtggcctctcaagaattttcacgtatctctatagtacagcagaaaaccctcctgatctggatggacataatgaaggagtaactatggctggatatggttatgggatccctattagtcgtctttatgctcgatatttcggtggggacttgcagatcatctctatggaaggatatggaactgatgcttacctccacttatcacggctgggagattcagaggaacccttgccttaaccgattcagaagaagccattcgattcagaagcagccattcctgtaattaggactctattgctttctcaattactgtgctggtattatgcaaatatagttctgatgaccagccacctatagtttcagctgttggtgtcctacttgttgtctttgttgttcattcatcatcttgatggaatgtgattatgattcagaatcgttttgcttctagtttgtactgtcattataattgttcgacctccaaaaatagttgccgtcgat

SEQ ID NO: 4740 - DNA, 1380 bp, Zea mays
ccacgcgtccgccaatttccacaaacctcgcgcgcggcggagggagaaggaaggatggcgtcggagccggtggcgcgggcggtggcggaggaggtggcgcgctggggcgcgatgcgccagaccggggtcagcctgcgctacatgatggagttcggggcgcgccccacggagcggaccctccttctcgccgcgcagttcctgcacaaggagctccccatccgcatcgcgcgacgggcgctcgacctcgactcgctccccttcggcctctccaccaagcccgccatcctcaaggtgaaagattggtatgtggagtcattccgtgaaatccggtcctttccagaggtgaggaaccagaaagatgagctcgccttcacccagatgatcaaaatgatcagggtacgacacaccaatgtggtgcctgcgattgcattgggtgtgcagcagctgaagaaggacttgggcggtccaaaggcgttcccccccggaatccatgagatccatcagtttcttgaccgcttctacatgtcaaggattgggatccggatgctgatagggcagcacgtcgctttgcatgaccctgatccagagcctggtgtgatagggcttataaacacaaaaatgtcacccatgacagttgctcgaattgctagtgaagatgcacgtgctatttgcatgcgggagtatggatcatctcctgatgtcgacatatatggtgatccgggttttacatttccatatgttacaccacatctacatctcatgattttcgagctggtgaagaactcccttcgcgcggtacaggaacggtatatggattctgataagcttgcacctccagttcgaatcatagttgctgatggagcagaggatgtaactattaagattagtgatgaaggtggtggaataccaaggagtgggctctcaagaatttttacgtatctctatagtacagcagaaaaccctcctgatctggacggacataatgaaggagtaactatggctggatatggttatgggatccctattagtcgcctttatgctcgatatttcggtggggacttgcagatcatctctatggaaggatatggaactgatgcttacctccacctttcacggctgggagattcggaggaacccttgccgtaatttattcaaaagaaccattcctgtaattaggatattgcttctgtgctggtatgcaagtatagttctgaaggccagccacctgttcagctgttcgtgtccctacttgttgtctttattgttcattcatcatcttaatggattgtgatcgtaattcctaatcgttttatgactgatttgtactgtcaaaaaaaaaaaaaaaaaaaaaaaaaaaaaaaaaaaaaaaaaaaaaaaaaa

SEQ ID NO: 4741 - DNA, 1632 bp, Zea mays
ctcttgcgtcacacctcctccctcctggcctcctcctgcggcccacttatatataccaccacgtcgatgcgctgctccgccggcatctccatcgccgtcgcgccgccgtagatggcctgacatttttcacttcatttgtcatcccaattccacaaacctcgcgcgcggcggcggagggaaacaaaaaaaaaaaaaggaaggatggcgttggagccggtggcgcgggcggtggcggaggaggtggcgcgctggggcgcgatgcgccagaccggggtcagcttgcgctacatgatggagttcggggtgcgccccacggagcggaccctcctgctcgccgcacagttcctgcacaaggagctccccatccgcatcgcgcgacgggcgctcgacctcgactcgctccccttcggcctctccaccaagcccgccatcctcaaggtgagagattggtatgtggagtcattccgtgacatccggtccttcccagaggtgaagaaccaggaagatgaactcgccttcacccagatgatcaaaatgatcaaggtgcggcacaccaatgtggtgcctgcggttgcattgggtgtgcagcagctgaagaaggacttgggtggtccaaaggcgttcccacctggaatccatgagatccatcagttccttgatcgcttctacatgtcaaggattgggatccggatgctgatagggcagcacgtcgctttgcatgaccctgatccagagcctggtgtgatagggcttataaacacaaaaatgtcacccatgacagtagctcgaattgctagtgaagatgcacgtgctatttgcatgcgggagtatggatcatctcctaatgtcgacatatatggtgatccggggtttacattcccatatgttacaccacatctacatctcatgatttttgagctggtgaagaactcccttcgcgcagtacaggaacggtatatggattctgataagcttgcacctccggttcgaatcatagttgctgatggagcagaggacgtgactattaagattactgatgaaggtggtggaataccaaggagtggtctctcaagaatttttacgtatctctatagtacagcagaaaaccctcctgatcttgatgtacataatgaaggagtaactatggctggatatggttatgggattcctattagtcgtctttatgctcgatatttcggcggggacttgcagatcatctctatggaaggatatggaactgatgcatacctccacttatcacggctgggagattcggaggaacccttgacttaatcgattcataagaagccattcctcattcctgtagttaggactctattgctttctcaattaccgtgctggtatgcaaatattgttctgaaggccagtcacctattagttcagctgtccatgccctatttgttatctttgttgttcattcatcatctcgatggaatgtgatcataattcagaatagttttgcttctggtttgtactgtcattataattgttcaacctccaataatggtatctgtcgagcacccgaggcattgaatttgagtaatggaattcaccataattgttcaacctccaataaagtctgtaactccaattcttcaaagcatgtttttt

SEQ ID NO: 4742 - DNA, 1524 bp, Sorghum bicolor
atgggcttccaggtggccgccgtggcaccgtcgccgtgcgcgcgctcctcctccgcctcgtcgtcgccctcgacctcctcccggccgttgcccgctttcctcggaggcggcggcggcggcggcggatgcgccgggctcgcgagatcccgctcacccctaaactggggaaccggtgtgatggtgcggcggccgcgcctggctcggacgccagcgaggtgcgcgctgagcgcgagtttggatgggatgggtggcggggacgcggagttcatgaagaggatcgaggagctcgcggcggcggtcggggtgcagccggcgggcgcggcgggttgcggcgggtggcccgcgagcgtggagcgcagcgcgagcaacgtcgggctgccgctgtcgctgcggatgctgaagcggaaaaagcagcagcagcagcaggtggtggcggcgcggcattcgcgctgggacgaggagctgctgggcatgggctccgccggcgagtcggtgggccgtgccttctcctccatggtgctcattgtgcgggagctgcagagcttcgcgctgcagcagatgcgcgacgcgctgctctgcgacgacctgcagggcgtcctggcgcgcgtgcagggcgagatgcacgcctccttcgtctggctcttccagcacatcttcgcgggcacgccggcgctcatggtctccctcatgctcctcctcgccaacttcaccgtccaatcgatgggccacagcgtcgccgctgcggccgccaccatcccgcccactccgcctgctgtcgccctggtcaacacccagcgcgccgagccgtcacgaccgccgcggttcgacgcggcggcttcggtgaagacgttctccgtcggccggacggcctcggtcggtgggaacagcggcggtggcggcaaggcgccgcctgtcgcgggcgccaccggtgacggccggtcggacgagtccttgtatcggctaagccgtgtggcgccgcagcagccgtcgtcggcgccccctggggctgaggtcgccgcccaagacgctgcgaacgcggacgagcaggccatttgggaaatgatgctcgcggaggcctccaagatgcaggccagcgcgcgcgccgaggagctgagcgactcggacgtgctgagaagcctcgtcgcgccggtggaggcggagctggagactgaggaccacgccgagcacacgctgacgcagcagaggtacgagcaggccgtcgccgctgagcccaacaattcgctcatcctcgccaacttcgcgcagttcctctacctcgtgcagaacgaccacgaccgggcggagcactacttcgagagagctgtgcgcgctgagccggcggactcggaggcgctgagctggtacgctacgtttctgtggaaggcacggaacgacctcgccggcgcggaggacacctaccaggaggccatcgcggccgaccccgggaacgctcaccacgccgcggcctacgcgcacttcctctggaacaccggaggtgaggaaacatgctacccactcgattga

SEQ ID NO: 4743 - DNA, 2072 bp, Zea mays
agctgctattcccacacctcgtgcggcggtggcccaaccaaagggcagccggggtcgcttgaggcggtgagtcctcgtcctcgtccgatatcgcagcggaacaaggtcatgggcttccaggtggctgccgtggcaccgccgccgtgcgcgcgctcctcctccgccttatcgtcgccctcgacctcctcgcggccgttcctcggaggcggcggcggatgcgccgggctcgcgagatcccgggcacccgtaaactggggaaccggcgtgatggtgtggcgcccgcgcccggctcggacgccagcgaggtgcgcgctgagcgcgagtttggatgggatgggtggcggggacgcggagttcatgaagaggatcgaggagatcgcggcggcggctggggtgcasccggccggtgcgtcgggttgcggctggcccgcgagcgtggagctgagcgcgagcaacgtcgggctgccgctgtcgctgcggatgctgaagcggaaaaagcagcaacagcaggcgcagctgcaggctgtagcgcgtccttcacgctgggacgaggggctgctgggctccgccggggagtcggtgggccgcgccttctcctccatggtgctcatcgtgcgggagctgcagagcttcgcgctgcagcagatgcgcgacgcgctgctctgcgacgacctgcagggcgtcctggcgcgtgtgcagggcgagatgcacgcctccttcgtctggctcttccagcatatcttcgcgggcacgccggcgttcatggtctccctcatgctcctcctcgccaacttcaccgtccaatcgatgggccacagcgtcgccgctgcggccgccaccatcccgcccaccccgcctgctgtcgcccttgtcaacgcccagcgcgccgagccgtcacgtccgcggttcgacgcggcttcggtgaagacgttctccgtcgaccggatggcctcggtcgggggggacagcggcggtggcggcaagaccccgcctgtcgcgggtgccaccggcgacggccggtcggacgagtccttatatcggctaagccgtgtgtcgccgcagcagccgtcggcaccccctgtggctgaggtcgcccaagacgctgcggacgcggacgagcaggccatttgggaaatgatgctcgcggaggccttgaaggccagcccgcgcaccgaggagcttagcgatccggacgtgctaagaagcctcgtcgcgccggtggaggcggagctagagaccgaggaccacgccgagcacacgctgacgcagcagagatacgagcaggccgtcgccgctgagcccaacaatccgctcatcctcgccaacttcgcgcagttcctctacctcgtgcagaacgaccacgaccgggcggagcactacttcgaaagagccgtgcgcgctgagccggcggactcggaggcgctgagccggtacgctactttcctatggaaggcgcggaacgacctcgccggcgcggaggacgcctaccaggaggccatcgcggccgaccccgggaacgcccaccacgccgcggcctacgcgcacttcctctggaacaccggagcatgcacgggcacgggggcggaggccacgcggcaagacgcctagaccacgacatcacaccatggccccgggcggtggagtgtagctgacacatgatatcgcccctttttacatagtctgattagaagattgcgtgcgtgccgtgggcagtggagtgagttgtgatccaggaggacacgttggtggtggtgtttcttcccgcgctccgggaaccgcggcggagaaggacgggcctctcgggtcccgacgaccttgtcgggaccaaccggcggccggaaggcatggacggctggctatagaaacgtggtagagcgcagagtcgtcgagggcgacgaggtggtggcatcatggatcagggataggatgttctatggaatactctagggtatagcgactcgcatcatgtaattatgtactagatgtggaaaaaataacatccgaataagaagacgccgtaatccaggtaaagtaccgacctcggatctagcgtgctaaaaaaaaaaaaaaaa

SEQ ID NO: 4744 - DNA, 2098 bp, Oryza sativa Japonica Group
gcggcttcctctcttctgcggccgcgcgcgatctccacacctcccctgcggaggcaaggaaggagaggcgcccctccacacgcggagcagaagagagccatgggcctccaggtcgcggccgtcgcgccatccccgtgcgcgcgctcctccgcctcgtcttcgccgccctcgacatcctcctcgcgtcccgccctcggcggtgcggggctcgcgagatcccgcgccccggttaattggggcgccggtgttatggcgcggcgccgcgggttgcggcagccggcgaggtgcgccctgagcgccagtttggatggcgtggggggcggggacgcggagttcttgcggcggatcgaggagctcgcggcggcggtgggtgtgcagcccacgggttgcgggtggccggcgagcgtggagcgcagcgcgagcagcgccgggatgcctctgtcgctccggatgctgaagcggaagaagcagcagcagcagctggtggcgcggcagacgcggtgggacgagcggctgctgggctccgccggcgactcggtggggcgcgccttctcgtcgatggtgctcatcgtgcgggagctgcagagcttcgcgctgcagcagatgcgggaggcaatgctgggcgacgacctgcagagcgtcctggcgcgagtccatggcgagatgcacgcctccttcgtctggctcttccagcacatcttcgccggcaccccggctctcatggtctccctcatgctcctcctcgccaacttcaccgtccactccatgggtcacagtgtcgccgccgccgcagccatccctcccgctccacctacctccgcggctgtcgcggtggtcgacacccagcacgccgacccatccctcccgcggttcgacgcggcctcggtcaagacgttctctattgggcgtgccgcctcggtcggcgggagcagcggcggtggcgggaaggttcggcccgtcgcgggcgccactggcgacgaccggtgggacgaatccctagctcggctgagcggtgtcgcgccgcagcaaccagcgccgccggcgggaacgggagctggtatggccgtggacgagcaggccatctgggaaaggatggtggcggaggcctcgaacatgcaggagaacgcgcgtgcagaggagctgagcgacccggacgtgctcggcaacctcgtcgcaccggtggaggcggagatcgagacggagggccacgctgagtacacgcggacggagcagcggtacgagctcgccgtgtccgaggagcccaataacccgctcatcctggccaacttcgcgcagttcctctacctcgtgcagaacgaccacgaccgggcggagcagtacttcgagagggcggtgcgcgcggagccggcggacgcggaggcgctgagccggtacgcgacgttcctgtggaaggcgaggaacgacctcgcggcggcggaggacacctaccaggaggccatcgcggccgaccccggcaacgcgcaccatgccgccgcctacgcgcatttcctctggaacaccggaggtgaggacacatgtttccccctcgattgacgcggccaccggcacaacaatggccactcgaaatcagacagaaaattaggaagcggaaaaaaaaaagaatctctattcaaagaagtccagttcgtgcagcatgcgcgggggcggccacgcggcgagacgcctagagcacacgacgacatgggcggcggagtggagctgacgcatgatgccttccgtttacttaggtaggttgagtagaggtgtgcgtgggcagtggagtgagttgtgagcttgtgagttgtgtgatacgggagagcgcgcggtgccgcttctcccgttccacaaatccggcgacgggagcatttcgccgggaatgaggaagaggacggatacggggatgcaagctcatttcccgacgatcttgtcggcaggggtacggtggcgtggatggatggatggtgtatagcaacttgcgtcctgtaattatgtagattgagcaaaaagaataatagtactaagtgaataaagaggtcatgttaatctcggtgtaatcctcctcggatctaatgcatttctgcttccagttggtacttcc

SEQ ID NO: 4745 - DNA, 2106 bp, Hordeum vulgare subsp. vulgare
gagagagccgcctccttccaccgctggcttccacacctccctcgcgctcgcggtgctgatctcgaggcccaaccaaaggccgagggttctcgccgcgcgcagggaaggggactaggcaaagacaagtcatgggcttccaggtcgcggccgtcgtgccatcgccgtgcgcgccctcctcggcgccctccacttcctcccggtcgccattcctcggcggcggctgcggcatgcccgtgagatcctccgcgccgggcggtcttgtggcgcgccggcgtggcgaggggcggcccgcgaggtgcgcgctgagcgctagcatcgacgggacgggaggcggggacttggagttcttgaggaggatcgaggagctggcggcgtcggcaggggcgcggacggcgggatgcgggtggccgccgagcctggagcggagcgccagcgccgtcggcctgcccctgtcccttcgaatgctgaagcggaagaagaagcagcagcaggtggcgccgcggtcgcggtgggacgagcggctgctccttggctccgccggtgagtcggtgggccgcgccttctcgtccatggtgctcatcgtgcaggagctgcagagcttcgcgctgcagcagatgcaggaggccctgctctgcgacgacctgcagggcgtcctggcgcgcgctcatggcgagatgcacgcctccttcgtctggctcttccagcacatcttcgccgccaccccggcgctcatgctctcccttatgcttctcctcgccaacttctccgtccactccatgagccacagcgtcgccgctgccgccgtctcaccgaccctgcccgccgccgcggctgccacactggtcgacgcccagcacaacgagccatccaacccgcggttcgatgctgtctctgtcaagacattctcgtctggccggactgcgtcggtcggtgggggcagcgggggtggcggcgatgttcgccccgtcgcgggcgcttccagcgatgaccggtgggacgaatcccgctacagtcttaaccgcgtcgcgccacagcaacttgcgccgctggcggggatgggcgcggacgccgccgccgtggacgagcaggccatctgggataggatggccgcggaggcctcgagcatgcaggccgacgcacgcgtcgatgagttgacggatccgagcgtgttggggagcctcgtcgcgccggtggaggcggagatcgagacggaggacgtcggcgagtacgcgcggacggagcagaggtacgagctggccgtgtcagaggagcccaacaattcgctcatcctcgccaacttcgcccaattcctctacctcacgcggaaggaccacaagagggcggagcactactttgagcgggcggtgcaggcggagccgacggacgcggaggcgctgagccggtacgcgacgttcctgtggaaggcgcgggacgacgtcgaggcggcggaggagacgtaccaggaggccatcgcggccgaccccggcaacgcgcactacgccgctgcgtacgctcatttcctctggaacaccggcggcgaggacacgtgcttccccctcgattgacgcgcggaggagggaccgagttcttgcgtcgtccgcggtggctgccgggcacgaggccagacgccgagagcacggcaccatggccggccaagccagggggcggtggagtggagccgagctaactttccgtttactgagttaggttgagtaggtatgctcaggggggcagtggaggctgtggcgccgtgtctcccgttccgggaatacggctcttggccgggaacggggacgatggacgtgcaggtgtgagggcgaagtcccgatgagcttgtcggtcatctccctgacatgcaatggatggctgtaggctggtagtgtggtacaaacgggaggaagaaaggccatggtccatggatatgttgtgtatagcaacttgcatccggtaattatgtacgtatatgagcaaaaaacaagtgaataataagaaggtgatggtgatctccatgcaatctctctcggatcttgtatatttgtactgttgctctagccagactttagggattgaaatggccaatgtgcaagcaagaacattttctttgcc

SEQ ID NO: 4746 - DNA, 2746 bp, Sorghum bicolor
ctcccttcccataccgtaccactctccccgtttctctccggccggttcgtgggagggccgaagcttcgagaaaggaaaccctaacgctgttgggacttgggagtagcctccggcgatggctgcggcggcgatcctgccggagctggcgacgcaggtgctcatcccggtcgcggcggccgtgggcatcgcgttcgcggtggtgcagtgggtgctggtgtccaaggtgcggctcacccccgagcgccgtgcggacggcggagccgccaagagcgggcccagcgactacctcatcgaggaggaggaggggctcaacgaccacaacgtcgtcgtcaagtgcgccgagatccagaacgccatctctgaaggagctacatctttccttttcactgagtacaagtatgttggattattcatgggcatctttgcaatccttatattcctcttccttgggtccgtcgagggattcagcacgaagagtcaaccttgccactatagcaagggcaaaacttgcaagcctgcccttgctaatgccatcttcagtactatagcttttgtgcttggtgccgtcacctcactggtttctggatttcttggaatgaagattgcaacttatgcgaatgcccggacaactttagaggccagaaagggtgttgggaaggcatttattactgccttccgatctggtgcagttatgggctttctgcttgctgccagtggtcttttggttctttacattgctatcaatttgtttggaatttattacggtgatgactgggaaggtctttttgaggctattactggttatggccttggtggttcttctatggctcttttcggccgcgttggtggtggtatttataccaaggctgctgatgttggtgctgaccttgtgggtaaggtagaaagaaacattcctgaggacgatccaagaaacccagctgtcattgctgacaatgttggtgataatgttggagatattgctggaatgggatcagatctcttcggctcatatgctgaatcgtcatgtgctgctcttgttgtggcctcaatctcgtcttttggaatcaaccatgaatttactccgatggtgtacccccttcttgtcagctctgttggtattatagcatgtctcgtaacaacgctgtttgcaactgatttcttcgagataaaggctgtgagtgaaatagagcctgctctcaagaaacaacttataatatctactgttgtgatgaccattggcattgcgctcatcagttggcttggtcttccatacaccttcaccatttttaactttggagaacagaagacagtgcaaagctggcaattattcttgtgtgtggcggttggtctctgggctggcctagtcattggatttgttaccgagtactacacaagcaatgcctacagccctgtacaagatgttgctgattcctgcagaactggagctgccactaatgtcatttttgggcttgctttgggttacaaatcagtcattatcccaatttttgctattgcgtttagtatcttcctcagcttcagccttgctgccatgtatggtgttgctgtggctgctcttggaatgctgagtaccattgccacaggccttgccattgatgcctatggccctatcagtgataatgctggaggaatagctgaaatggctgggatgagccataggattcgtgagagaaccgatgctctagattctgcaggaaacaccactgctgcaattggaaagggctttgccattggctccgcagccttggtgtcccttgcactcttcggtgcctttgtaagccgggctgctatctccactgttgatgttctgactcctaaagtattcattgggcttattgtcggtgctatgctcccatactggttctcggcaatgaccatgaagagtgtaggcagtgctgcactcaaaatggtggaggaagtccgccggcagttcaacaccatccctgggctcatggagggcaccacaaagcctgactatgcaacttgtgtcaagatctcaacggatgcatccatcaaggagatgatccccccaggtgctcttgttatgctcacaccactgatcgttgggattttgtttggggttgagaccctctctggagtccttgctggtgcccttgtctctggtgttcagattgccatttctgcatccaacactggtggtgcctgggacaatgccaagaagtacattgaggctggagcttcagagcatgccaggacccttggcccaaaaggttctgaccctcacaaggcagctgtcattggtgacaccattggagatcctctcaaggacacgtctggcccctccctcaacatcctcatcaagcttatggcggttgaatcccttgtctttgcccccttcttcgccgcccatggtggcattctcttcaaatggctctaagccagcgagagtcgcaggataaaggccgtagttttgcaaggggagtagagcagtatgtcagctatacagcatatatggcatgtgctttgctccaccagttgatgagccccgttgtgtattttggttttcgttttcttgagtttttagttccagggtccgaccatgttttgatcccataaattctcctccggccttcgagcaactgagactatcttcgtaagtcatcagacccagccaatcactgaagcattggaaaactaaacagtttctagcgatatggtgatgattatgatgatgatgattaatctcagcattttttttcttcttgac

SEQ ID NO: 4747 - DNA, 2798 bp, Hordeum vulgare subsp. vulgare
gtccggtctcctccctccctccctccctccatccaccccctctctcgtgctacctaatcctccgcggaaggtgggggaacgggacgaagccagcgtactgatctcagcggcggagatggtggcggcggcgatcctgccggagctggccacgcagctggtggtgccggtggcggcggcggtcggcatcgccttcgcggtgctgcagtgggtgctcgtctccaaggtcaaggtcgcccccgagccgcgcgccgagggagggtcggcctccgccgccggcggcaaggacggcgccaccgagtacctcatcgaggaggaggagggcctcaacgaccacaacgtcgtcctcaagtgcgccgagatccagaccgccatctccgaaggagcaacctccttccttttcactgaatacaagtatgccggaggattcatgaccattttcgcggtcctgatcttcgtcttccttggctccatcgaggggttcagcacaaagagccagccttgccattacagcgtgggcaagacatgcaagcctgctcttgctaatgctgccttcagcacaattgcctttgtgctaggtgcggtcacctctcttgtgtctggtttccttggaatgaagattgcgacctatgcgaatgccaggacaactctcgaggcaaggaagggtgttgggaaggcgttcatcaccgctttccgctctggtgccgtgatgggcttccttcttgctgcaagtggcctttttgttctttacgttgcaatcaacctgtttgggctttattatggtgatgactgggagggtctattcgaggctatcaccggttatggtctcggcggttcttccatggctctttttggccgtgtaggcggtgggatttacaccaaagctgctgatgttggtgctgatcttgttgggaaagtagaaaggaacatccctgaggatgacccgaggaacccagctgtcattgcagacaatgttggtgacaatgttggagatattgctggaatgggttcagatctctttggttcctatgccgagtcatcttgtgctgctcttgttgttgcctcaatctcttcctttggaattaaccatgaattcacccccatgatgtacccactcctaatcagctcagtgggtataatagcctgtttgataacaactctttttgcaactgatttctttgaggtgaaggaggtagatcaaatagagcctgccctaaaaaggcagcttataatctccactgctgtgatgaccattggcattgcactagtcagttggttgggtctcccatataccttcacaatattcaactttggtgcccagaagactgtgcatagctggcaactatttttgtgtgtggctgttggtctctgggctggcctagtcattggattcattacagagtactacacaagcaatgcatacagtcctgtgcaggatgtcgccgattcctgcagaactggagctgctaccaatgtcatctttggtcttgctctgggatacaaatcagttattatccctatctttgccattgccttcagtattttcctcagcttcagccttgctgcgatgtatggtgttgctgtggctgctcttggaatgctcagcacaattgctactggtcttgccattgatgcctatggccctatcagtgacaacgctggaggcattgctgaaatggctggcatgagccacagaattcgtgaaagaactgatgctctcgatgctgcaggaaacacaactgctgccattggaaagggctttgcaattggctcggctgccttggtgtcccttgctctctttggtgcctttgtgagccgtgctgggatcacgaccgttgatgtcctgacacctaatgtctttattgggctccttgttggcgccatgctcccatactggttctctgcaatgaccatgaaaagtgttggaagtgcggctctcaagatggtggaggaagtgcggaggcagttcaacaccatccctgggctcatggagggcaccgccaagcccgactatgcgacatgtgtgaagatctccactgatgcgtccatcaaggagatgatcccaccgggtgctcttgtcatgctcacaccactcattgttgggaccttatttggtgttgagaccctctctggtgtccttgccggtgctctggtttctggtgttcagattgccatttcggcatcgaacacgggtggtgcatgggacaacgccaagaagtacattgaggctggcgcatctgagcatgcaaagagcctgggcccgaaaggctctgactgccacaaggccgccgtgatcggtgacaccatcggggaccctctcaaggacacctcgggcccctcgctcaacatcctcatcaagctcatggcggttgagtccctcgtgttcgcccccttcttcgccacctatggaggaatcctcttcaagattctgtagagcaagaagatcgactgtctagttttgacggttgggagcgcgctacttcatccacatgttatggagctccttcagttgatgaccctcttgtgttttacattttgttgttcctggtcttgcgcaatcatgttggaacttgtctagtttttcattctggtagctgtagtagtggtagcagagggtagcgaaatggacggccatttgacaggtttgtattagagtgtcttgggagttatgttttgcctgtagatggatgatgacgacgacgacgatgatgaatcttgtatgcccattgcggatttcgtgtcttgaattttcaatgggagctactcttaatgttttgtaggtggctgtatggatgcaatgc

SEQ ID NO: 4748 - DNA, 3196 bp, Oryza sativa Japonica Group
tctcctctcctcctcctcttcgcgtcgaatcctcctccgagaagaggagagtacatgaatcctagcgcgaggatctcgcaggtagcaatggcggcgatactgccggacctggcgacgcaggtgctggtcccggcggcggccgtggtcggcatcgcgttcgcggtggtgcagtgggtgctggtgtccaaggtgaagatgaccgcggagcggcgcggcggggaggggtcccccggcgcggccgccgggaaggacggcggcgccgccagcgagtacctcatcgaggaggaggaggggctcaacgagcacaacgtcgtcgagaagtgctccgagatccagcacgccatctccgaaggagcaacttctttcctcttcactgaatacaagtatgttggactattcatgggcattttcgcggtcctgatcttcctcttccttggatctgttgagggattcagcacaaagagtcaaccttgccactacagcaaggataggatgtgcaagcctgcccttgcaaatgctatcttcagtactgttgcctttgtgcttggtgcagtcacctctcttgtatctggtttccttggaatgaagattgcaacttatgcaaatgccaggacaacccttgaggcaaggaagggtgttgggaaggcattcattactgctttccgctctggtgctgtcatgggtttcctgcttgctgcaagtggccttgttgttctttacattgccatcaacttgttcggaatttattatggtgatgactgggaaggtctttttgaggctatcactgggtatggtcttggtggttcttctatggccctatttggccgtgtaggtggcggtatttacacgaaagctgctgatgttggtgctgacctagttgggaaagtagaaaggaatatccctgaagatgacccaagaaacccagctgtcattgcagataatgttggtgacaatgttggagatattgctggaatggggtcagatctctttggttcctatgctgagtcatcttgtgctgctcttgtcgttgcttcaatctcttcttttggaattaaccatgaattcactcctatgctgtacccgctcctgattagctcagttggtatcattgcttgtctgataaccacacttttcgccactgatttttttgagatcaaggctgttgatgaaattgagcctgccctcaagaagcaacttataatttccaccgttgtgatgacggttggcattgcacttgtcagttggttaggcctcccatattccttcacaatattcaactttggtgcccagaagactgtgtataactggcaacttttcttgtgtgtggcggttggtctttgggctggactaatcatcggatttgtgacagagtattacacaagcaacgcctacagccctgtccaagacgttgctgattcctgcagaaccggagctgctactaatgtcatctttggccttgctctgggatacaaatctgtcattattcctatttttgctattgcttttagtattttcctcagcttcagccttgccgcaatgtacggtgtagctgtggctgcccttggaatgcttagcacaattgcaactggtcttgccattgatgcctatggccctatcagtgacaatgctggaggaattgctgagatggctggcatgagtcacagaattcgtgagagaactgatgctctggatgctgcaggaaacaccactgctgccatcgggaagggtttcgccattggctcggcagccttggtgtctcttgccctctttggtgcctttgtgagccgtgccgccatctccactgtcgatgttctgacacctaaagttttcattggactgattgttggtgctatgctcccatactggttctctgctatgaccatgaagagtgttggcagcgcagcgctcaagatggtggaggaagtccgtaggcagttcaactccatccctgggctcatggagggcacaaccaagcctgactacgcaacctgtgtgaagatctccactgatgcatccatcaaggagatgattcccccaggtgctcttgtcatgctcagccctctcattgttgggatcttctttggtgtcgagaccctctcaggactacttgctggtgctctcgtttctggtgttcagattgccatctctgcatcaaacactggtggtgcctgggacaacgcaaagaagtacattgaggctggtgcatctgagcatgcaaggaccctgggcccgaaaggctcagactgccacaaggctgctgtgatcggcgacaccattggggatcctctcaaggacacctcaggcccctcgctcaacatcctcatcaagctgatggctgtcgagtcgctcgtgtttgccccgttcttcgccacccatggaggcatcctcttcaagtggttttagatggtgacgatagatttacgaggacgttatttttgccaggagggcgctggaaatcatccatatattatagagttcatcgagttgacacatatagttccctccgtttcctatttgttattactgtctgtccatcagtcgatcatgctaagcttattagcatcatacctgtgtctagtttttttgagtctggtagttgtagccgatgggagcaaatcactggccacctacaggtttggacaagagtaccttgaatttgcgttttcctgtaggttggatgatacgatgatggtgatgattattgtacgtgcacggaatgcacctgtctcagtgaaattttcccgggaaggttctgctgtttctttatgtccttgtgggaatgttaggatgatcttgtacaaaaaagaaaacaactctagtgatagggggtggagtacatgtgtgccaactaagtttgagttgtcttgaattattgaagtaaaatactttagctaaaatgacgtagtagtgcgtgtgcttgcttttgttttaagatagagaattatagtattattttgtatactatattttcctcctttcttgcttcgttcgtttcatattataagactttctagcagactcacattcatatatatggtaatgaatctaaatatatatgtgtgcctagatccattaataactatatgaatgtgggcaatgctagaaagttttataatatgaaacggaggtaataatatgaaatggaggcagtatcttatattttctttatcctaaataaataaatctaaatttctgg

SEQ ID NO: 4749 - DNA, 2742 bp, Oryza sativa (japonica cultivar-group)
gtcgaatcctcctccgagaagaggagagtacatgaatcctagcgcgaggatctcgcaggtagcaatggcggcgatactgccggacctggcgacgcaggtgctggtcccggcggcggccgtggtcggcatcgcgttcgcggtggtgcagtgggtgctggtgtccaaggtgaagatgaccgcggagcggcgcggcggggaggggtcccccggcgcggccgccgggaaggacggcggcgccgccagcgagtacctcatcgaggaggaggaggggctcaacgagcacaacgtcgtcgagaagtgctccgagatccagcacgccatctccgaaggagcaacttctttcctcttcactgaatacaagtatgttggactattcatgggcattttcgcggtcctgatcttcctcttccttggatctgttgagggattcagcacaaagagtcaaccttgccactacagcaaggataggatgtgcaagcctgcccttgcaaatgctatcttcagtactgttgcctttgtgcttggtgcagtcacctctcttgtatctggtttccttggaatgaagattgcaacttatgcaaatgccaggacaacccttgaggcaaggaagggtgttgggaaggcattcattactgctttccgctctggtgctgtcatgggtttcctgcttgctgcaagtggccttgttgttctttacattgccatcaacttgttcggaatttattatggtgatgactgggaaggtctttttgaggctatcactgggtatggtcttggtggttcttctatggccctatttggccgtgtaggtggcggtatttacacgaaagctgctgatgttggtgctgacctagttgggaaagtagaaaggaatatccctgaagatgacccaagaaacccagctgtcattgcagataatgttggtgacaatgttggagatattgctggaatggggtcagatctctttggttcctatgctgagtcatcttgtgctgctcttgtcgttgcttcaatctcttcttttggaattaaccatgaattcactcctatgctgtacccgctcctgattagctcagttggtatcattgcttgtctgataaccacacttttcgccactgatttttttgagatcaaggctgttgatgaaattgagcctgccctcaagaagcaacttataatttccaccgttgtgatgacggttggcattgcacttgtcagttggttaggcctcccatattccttcacaatattcaactttggtgcccagaagactgtgtataactggcaacttttcttgtgtgtggcggttggtctttgggctggactaatcatcggatttgtgacagagtattacacaagcaacgcctacagccctgtccaagacgttgctgattcctgcagaaccggagctgctactaatgtcatctttggccttgctctgggatacaaatctgtcattattcctatttttgctattgcttttagtattttcctcagcttcagccttgccgcaatgtacggtgtagctgtggctgcccttggaatgcttagcacaattgcaactggtcttgccattgatgcctatggccctatcagtgacaatgctggaggaattgctgagatggctggcatgagtcacagaattcgtgagagaactgatgctctggatgctgcaggaaacaccactgctgccatcgggaagggtttcgccattggctcggcagccttggtgtctcttgccctctttggtgcctttgtgagccgtgccgccatctccactgtcgatgttctgacacctaaagttttcattggactgattgttggtgctatgctcccatactggttctctgctatgaccatgaagagtgttggcagcgcagcgctcaagatggtggaggaagtccgtaggcagttcaactccatccctgggctcatggagggcacaaccaagcctgactacgcaacctgtgtgaagatctccactgatgcatccatcaaggagatgattcccccaggtgctcttgtcatgctcagccctctcattgttgggatcttctttggtgtcgagaccctctcaggactacttgctggtgctctcgtttctggtgttcagattgccatctctgcatcaaacactggtggtgcctgggacaacgcaaagaagtacattgaggctggtgcatctgagcatgcaaggaccctgggcccgaaaggctcagactgccacaaggctgctgtgatcggcgacaccattggggatcctctcaaggacacctcaggcccctcgctcaacatcctcatcaagctgatggctgtcgagtcgctcgtgtttgccccgttcttcgccacccatggaggcatcctcttcaagtggttttagatggtgacgatagatttacgaggacgttatttttgccaggagggcgctggaaatcatccatatattatagagttcatcgagttgacacatatagttccctccgtttcctatttgttattactgtctgtccatcagtcgatcatgctaagcttattagcatcatacctgtgtctagtttttttgagtctggtagttgtagccgatgggagcaaatcactggccacctacaggtttggacaagagtaccttgaatttgcgttttcctgtaggttggatgatacgatgatggtgatgattattgtacgtgcacggaatgcacctgtctcagtgaaattttcccgggaaggttctgctgtttcttt

SEQ ID NO: 4750 - DNA, 4883 bp, Oryza sativa
  misc_feature (1517)..(1517): n is a, c, g, or t
cggcgatactgccggacctggcgacgcaggtgctggtcccggcggcggccgtggtcggcatcgcgttcgcggtggtgcagtgggtgctggtgtccaaggtgaagatgaccgcggagcggcgcggcggggaggggtcccccggcgcggccgccgggaaggacggcggcgccgccagcgagtacctcatcgaggaggaggaggggctcaacgagcacaacgtcgtcgagaagtgctccgagatccagcacgccatctccgaaggtgagggagggggactgactcacccccgtgtgctgttcgtgtttttttttttggccttttttgggtggatctgagcacgcgcgtagttgtgtagatctcgtgccgtcgcagcggttactggcgctaatttttgctaatttagttgtttttttttggttgcttgtggcgtgaacatgttcaaaagtagcttatccgagcatcaattatggggaatttgcagcacaagattgatataattgtggggaatttgcagcacaggatttatatttttatattgctgtgaagcagtattataaagctcaggttaagatggcgctgcttttaatcaagcggagttgcgtgtctagcagtagtgcttgtgagcttgtgttactttatttattgtgtgaaatcatgagattcctctgagttctatcgaatttactgtggctaaagtagtattctattgtgtggaatcatgagattcctctctgagtttgattgaatttactgtgtgcctaaactataacgagagctgctacacatacgatttttcacgtacgatacttgtacgactaacgatttccagcgaaagcccgtaacgtttgtctcctgttttctagtgatgcacgcacggcgttcaccatcagttagaaatcatactagaatcgtacgcagaaatcgtatgcatagtattttcgaaactacaactatgctagtatgctagatgtgaactgttacattgttagttggatctacagaaacattaaacaatcatgttcccactttacacagcacatgttataataattcttagtcagtgcgtgctaatcgcgggtcaattaagttcgtttgttgcgtctgctgagatattttattggggagatatttttagtggggtagatcagaacttgaattgctcagttcttagaggccctcacgtaaagccctgcggtggccatgctgtggggataggagaatttactgatggaggaggacaagttattggaccagtggtcctacttattgctcttaggaggataagaagataacgatttttctgcgcacctgcattattgaagcagggagaaaatagtttcattttgactgtatccacctagcttggaaggaatcctagatgcggcgcacatggacgggacgatcttgtggtccattcattaatcataaaccttacatgtaaggttataattcaaggacagttgcaggctgagaggtggtgatttatgtagtttgtcctatgttaggcgcctgctttnttggcaggtttcatctctagcgatgcttgggtgagttttaatattgtgaaagtgttaggttctgtccttttctagtaaagttcaaacgtatttttggaaatatttgtttggtcaacatttctttcttagaagactatagggcttgcagttagtgtgccttacttgtggagtcctgctatgcatatgatctgtttcacaggaaatgctagatatgctaatagtttgcatggtttgtaatttgtgaatactggttttgtggaaactttctaggattggaactttgtttaatcaaatacatttttgttggtttcaattggttggatatttgagatattgggttactgaccagtgaccaaagtcccatctatttcactatttaatttagcctttgttaccatattttggtgctcatgtttatggagtccagtcaaacactacaattagaaaaacaggttcagttctaattataaacatatttatgcgttgctagctttggtgttttatgtttcagctattattattgttatcgctaaccttttcttgtcattgactaattgttgtatatttgtatgcgtctatgatctaaatactgttttttttaaactgtaaacaggagcaacttctttcctcttcactgaatacaagtatgttggactattcatgggcattttcgcggtcctgatcttcctcttccttggatctgttgagggattcagcacaaagagtcaaccttgccactacagcaaggataggatgtgcaagcctgcccttgcaaatgctatcttcagtactgttgcctttgtgcttggtgcagtcacctctcttgtatctggtttccttggaatgaagattgcaacttatgcaaatgccaggacaacccttgaggcaaggaagggtgttgggaaggcattcattactgctttccgctctggtgctgtcatgggtttcctgcttgctgcaagtggccttgttgttctttacattgccatcaacttgttcggaatttattatggtgatgactgggaaggtctttttgaggctatcactgggtatggtcttggtggttcttctatggccctatttggccgtgtaggtggcggtatttacacgaaagctgctgatgttggtgctgacctagttgggaaagtagaaaggaatatccctgaagatgacccaagaaacccagctgtaagaattctttcctgacgctttaaaaacttgtttcttaatattacttgaaataatttgttttgttcttttcataatgatttgtgttattgagcaaagcattaaaacatcgataggaatttatgtgcatgcaagaatgatcatttcttcctccttttgcaggtcattgcagataatgttggtgacaatgttggagatattgctggaatggggtcagatctctttggttcctatgctgagtcatcttgtgctgctcttgtcgttgcttcaatctcttcttttggaattaaccatgaattcactcctatgctgtacccgctcctgattagctcagttggtatcattgcttgtctgataaccacacttttcgccactgatttttttgagatcaaggctgttgatgaaattgagcctgccctcaagaagcaacttataatttccaccgttgtgatgacggttggcattgtacttgtcagttggttaggcctcccatattccttcacaatattcaactttggtgcccagaagactgtgtataactggtatgcccatatttaaattggaattccatcttttacttagaacttcattgttaaaatcattgacctcatttccctgattttgataggcaacttttcttgtgtgtggcggttggtctttgggctggactaatcatcggatttgtgacagagtattacacaagcaacgcctacaggtgcttataagtctgatcatattcaatgttgtctgtaatcttatatatttgcttctagtccctcatgtccctcacaccttgaatttcccttgtccagccctgtccaagacgttgctgattcctgcagaaccggagctgctactaatgtcatctttggccttgctctgggatacaaatctgtcattattcctatttttgctattgcttttagtattttcctcagcttcagccttgccgcaatgtacggtgtagctgtggctgcccttggaatgcttagcacaattgcaactggtcttgccattgatgcctatggccctatcagtgacaatgctggaggaattgctgagatggctggcatgagtcacagaattcgtgagagaactgatgctctggatgctgcaggaaacaccactgctgccatcgggaaggtaaaactgcttatcttgtcgaaagtgtttttatgttgtttttatgcttcatttccactctgaagtcaattaaaaatttaaaattgtgtttgcacttgtaaatatttttccttttgttacaaatgtcacaattttaaagttaattcccatctccatgattgtacttgtagggtttcgccattggctcggcagccttggtgtctcttgccctctttggtgcctttgtgagccgtgccgccatctccactgtcgatgttctgacacctaaagttttcattggactgattgttggtgctatgctcccatactggttctctgctatgaccatgaagagtgttggcagcgcagcgctcaagatggtggaggaagtccgtaggcagttcaactccatccctgggctcatggagggcacaaccaagcctgactacgcaacctgtgtgaagatctccactgatgcatccatcaaggagatgattcccccaggtgctcttgtcatgctcagccctctcattgttgggatcttctttggtgtcgagaccctctcaggactacttgctggtgctctcgtttctggtgttcaggttcgcacattctttttcacagccacactctcatcacttactcttgccatattgcattcataaccatgttgcttcctttcagattgccatctctgcatcaaacactggtggtgcctgggacaacgcaaagaagtacattgaggtaagaacttatcagccatcttccatcacagcaacacttgacgtcaagcagtttttttcccctcccatattcgccaaacattataactctcgttctccctggttttaggctggtgcatctgagcatgcaaggaccctgggcccgaaaggctcagactgccacaaggctgctgtgatcggcgacaccattggggatcctctcaaggacacctcaggcccctcgctcaacatcctcatcaagctgatggctgtcgagtcgctcgtgtttgccccgttcttcgccacccatggaggcatcctcttcaagtggttt

SEQ ID NO: 4751 - DNA, 2757 bp, Hordeum vulgare subsp. vulgare
caccccctctctcgtgctacctaatcctccgcggaaggtgggggaacgggacgaagccagcgtactgatctcagcggcggagatggtggcggcggcgatcctgccggagctggccacgcagctggtggtgccggtggcggcggcggtcggcatcgccttcgcggtgctgcagtgggtgctcgtctccaaggtcaaggtcgcccccgagccgcgcgccgagggagggtcggcctccgccgtcggggcaaaggacggcgccaccgagtacctcatcgaggaggaggagggcctcaacgaccacaacgtcgtcctcaagtgcgccgagatccagaccgccatctccgaaggacaaacctccttccttttcactgaatacaagtatgccggaggattcatgaccattttcgcggtcctgatcttcgtcttccttggctccatcgaggggttcagcacaaagagccagccttgccattacagcgtgggcaagacatgcaagcctgctcttgctaatgctgccttcagcacaattgcctttgtgctaggtgcggtcacctctcttgtgtctggtttccttggaatgaagattgcgacctatgcgaatgccaggacaactctcgaggcaaggaagggtgttgggaaggcgttcatcaccgctttccgctctggtgccgtgatgggcttccttcttgctgcaagtggcctttttgttctttacgttgcaatcaacctgtttgggctttattatggtgatgactgggagggtctattcgaggctatcaccggttatggtctcggcggttcttccatggctctttttggccgtgtaggcggtgggatttacaccaaagctgctgatgttggtgctgatcttgttgggaaagtagaaaggaacatccctgaggatgacccgaggaacccagctgtcattgcagacaatgttggtgacaatgttggagatattgctggaatgggttcagatctctttggttcctatgccgagtcatcttgtgctgctcttgttgttgcctcaatctcttcctttggaattaaccatgaattcacccccatgatgtacccactcctaatcagctcagtgggtataatagcctgtttgataacaactctttttgcaactgatttctttgaggtgaaggaggtagatcaaatagagcctgccctaaaaaggcagcttataatctccactgctgtgatgaccattggcattgcactagtcagttggttgggtctcccatataccttcacaatattcaactttggtgcccagaagactgtgcatagctggcaactatttttgtgtgtggctgttggtctctgggctggcctagtcattggattcattacagagtactacacaagcaatgcatacagtcctgtgcaggatgtcgccgattcctgcagaactggagctgctaccaatgtcatctttggtcttgctctgggatacaaatcagttattatccctatctttgccattgccttcagtattttcctcagcttcagccttgctgcgatgtatggtgttgctgtggctgctcttggaatgctcagcacaattgctactggtcttgccattgatgcctatggccctatcagtgacaacgctggaggcattgctgaaatggctggcatgagccacagaattcgtgaaagaactgatgctctcgatgctgcaggaaacacaactgctgccattggaaagggctttgcaattggctcggctgccttggtgtcccttgctctctttggtgcctttgtgagccgtgctgggatcacgaccgttgatgtcctgacacctaatgtctttattgggctccttgttggcgccatgctcccatactggttctctgcaatgaccatgaaaagtgttggaagtgcggctctcaagatggtggaggaagtgcggaggcagttcaacaccatccctgggctcatggagggcaccgccaagcccgactatgcgacatgtgtgaagatctccactgatgcgtccatcaaggagatgatcccaccgggtgctcttgtcatgctcacaccactcattgttgggaccttatttggtgttgagaccctctctggtgtccttgccggtgctctggtttctggtgttcagattgccatttcggcatcgaacaccggtggtgcatgggacaacgccaagaagtacattgaggctggcgcatctgagcatgcaaagagcctgggcccgaaaggctctgactgccacaaggccgccgtgatcggtgacaccatcggggaccctctcaaggacacctcgggcccctcgctcaacatcctcatcaagctcatggcggttgagtccctcgtgttcgcccccttcttcgccacctatggaggaatcctcttcaagattctgtagagcaagaagatcgactgtctagttttgacggttgggagcgcgctacttcatccacatgttatggagctccttcagttgatgaccctcttgtgttttacattttgttgttcctggtcttgcgcaatcatgttggaacttgtctagtttttcattctggtagctgtagtagtggtagcagagggtagcgaaatggacggccatttgacaggtttgtattagagtgtcttgggagttatgttttgcctgtagatggatgatgacgacgacgacgatgatgaatcttgtatgcccattgcggatttcgtgtcttgaattttcaatgggagctactcttaaaaaaaaaaaaaaaaaaaaaaaaa

SEQ ID NO: 4752 - DNA, 1539 bp, Zea mays
cccagcagcactgcctcgtcgtctcgcatattggcgttggcatcaccgtcggcattgtgcccattaccatgccgccgctgcccgcggccgacgatttactcattctcgagttcatcgcgagcaaccgccgtatcccccacgccgtgttcaactccttcatcgcctcccaatccccaccctccgccttctcccgcacctcacagcgcctccgaaaagccctagtgctccgcgccctcgacgccgccctctacaccgtgggcgcctcctgctcctccggcctcctcctccacaaggcgcgaaaggtcctcgccgaccccgacgcagccgcctgcttcccccaccagattccttttacagaaaatgaagaaaacgatgaggctagggctgcggtggccgatctcaagcgcctcctcgaccttgagtgggccaacctcccgccctccacgctcgagctcgtcgccggggacgggtcccaccagactggtgccgctgccgaccacaccatgcgtacaaagcttcgcctgttcgcgaagcgtgaaattttagctaagcctgtgcaggttggatccgcttctcatcaatcaattcggacgcaagttgctgataacgcgagcaatgccaataaagctgatggcgcccggcgagatgaggcacatccttctaattctaatgtaaactatgaggctgatagtgatcgtgaaagtatggttgggcaccaaaatgcatcggttaaaggagcagagggtcaactttcagagaagtctgtctttacttctaaaaagcgcgttcttgtggagagaattccgaagtgggatagctctgatgatgatcagccagtgcggaagcgcaagttagatccatttgagagaaaaccatatccttctcctacatgtgcatataagatcagaaagaaatggagtaagatagagatagaaaccttgctggaaggggtggacaagtatggcataggcaactggaaagatatcaaattagcttaccctggtgtctttgaggagagatcaacggtagatctgaaggacaagtttagaaatttgggaaagcgccaccatgaatcgtcttgaggcttagtggcgctgtgcttttgctctgccctggagatattttatgttgatggcagtggtatgcaaaagaaggcctatgtaaggtgcatggagacatttgggtttcgtgccaaggatattgttgacttgttgagtgcactgttcttaaggcgtcgcttagacgtccaggcggaggtccaacgcctagccgccttgcccgcctaccgtacctaggcgatggtccaacgccttgtatcgtcttaccgctttaaaaaacatcgttgatggttgagtgtttaaagataagtaactggaaccccacatgatggcatgttgtcacgggcgtgcacaactcgagcacccatctggctcagaaaagcaccatgggaagatagaactctggcattggtggaatctgatgcaatggtcattgtaattctgaattgaaaattttgaaccagtgacacactaattgttc

SEQ ID NO: 4753 - DNA, 1023 bp, Sorghum bicolor
atgccgccgctgaccgccgccgacgatttcctcattctcgagttcatcgcaggcaaccgccgcatcccctacgccgtgttcgactccctcctcgcctgcctatcctcaccctccgccatccaccgcacctcacagcgcctccgacaagccctagtgctccgcgccctcgacgcagccctcctcaccgagggagcctccagcctcgtcctctacaaggcgcggaaggtcctcgccgaccccgacgcagccgcctgcttcccccaccagatctctgttacagacaatgaagagaacgacgaggctagggccgcggccgcggtggccgatctcaagcgcctcctcgaccttgagtgggccaacctcccgccctccacgctagagcgcgccgccgacaggatcgccggggacggggctcaccagacgtgggccgccgccgaccacatcaaacgtacaaagcttcgcctgctcggggagtcgacggagcatgagattttatctaaggctgtgcaggatggatctgcttctcatcaaccaattgtgacggaagttgctgacaatgtgagcaatgccaatgatgctgatggtgctcaacgagatgatgaggcccattcttctaatgaaaacagtgaggctgatcgtggtcaagaaggtatggctgggcaccaaaatgcatcagttaaaggaggagagggtcaagtttcagagaagtctgtcccagcttctaaaaggtgcagtcttatggagagaaatcccaattgggatagttctgatgatgatcagccagtacggaagcgcaaattacatcgttttgagagaacttctacatgtgcacataagatcagaaagaagtggagtgagatagaggaaaaaaccttgctggaaggggtgaagaagtatggcaaaggcaattggaaagatatcaaattagcttaccctgatgtctttgaggagagatcaacggtagatctgaaggacaagttcagaaatttggaaaggcaccaccatgaatcggcatcggcttga

SEQ ID NO: 4754 - DNA, 1702 bp, Sorghum bicolor
gagaggttagagacacagagagagaatggccgccgacaggagaaccgtagtagtgtacgatgctgaagccggcgatgaccatgagaggcaagggactgtgtggacggcgacgtcgcacatcgtggcggcggtggtgggctccggcgtgctggcgctggcgtggacggtggcgcagctggggtgggtggtgggtcccctcgtcctcgtgggcttctcctgcgtcacctactacacctcggcgctgctcgccgactgctaccgctacccggaccccgtcgacggcgccgtcaaccgcgagtacatcgacgccgtccgatgctacctcgaccggaagaacgtggtgctgtgtgggtgcgcccagtacgtcaacctgtggggcactctcgtcggctacaccatcaccgccagcgccagcatgatcgcggtgaaacgcgtcaactgcttccaccgagacgggtacggcgcggcgggttgcaacccatcagggagcacctacatggtggtcttcggcgtcttccagctcctgctctcgcagctccccagcctccacaacatcgcctggctctccgtcgtcgccgtcgccacctccttcggctactccttcatcagcctgggtctctgcgccgccaaatgggcctcccacgacggcggccacgacatccgcggcacgctggcgggcgccgccgtcgacgtgccccgcgacaaggccttcaacgtgctcctcgcgctgggcaacatcgccttctcctacacgttcgccgacgtgctcatcgagatccaggacacgctcagggcgccgccggcggagaacacgacgatgaagaaggcctccttctacggcctcggcatgaccaccgtcttctacctcgcgctcggctgcactgggtacgccgccttcggggacgacgcgccggggaacatcttgactgggttcgccttctacgagcccttctggctcgtcgacgtcgccaacgtctgcgtcatcgtgcacctcatcggcgcctaccaggtgttcgcgcagccaatcttcgccaggctcgagtcctgcgtcgcgtgccggtggcccgacgcaaagttcatcaacgccacctactacgtgcgcgtgccgccgtgcctccgctcgtcgtcgagctcggcgccggcgtcgtcgacgacagtggccgtggcgccgctcaagctggtgctgcgaaccatcgtcatcatgttcacgacgctggtggcgatgctgctgccattcttcaacgccgtgctggggctcatcggagcgctcgggttctggccgctctccgtctacttccccgtcagcatgcacatggccaggctcaagatccggcgaggggagctccggtggtggttgctgcaggccatgagcttcgtctgcctgctcatctccatcgccgccagcatcggctccgtgcaggacatcgtgcacaacctcaaggccgccgcgccattcaagcccggaaactgattcttcatcatatcatatcattagtaatttaattaatactgctgatgaggagtgatgaattaattaactcgctgttaattaatttgttagctgtgactactgtgatgacgatcgagagggccagccgggtcgcgcctggccttttttttttttgttatttggcaaatttgatctctgtcgagcagattttcttgctgctaattcggacgttgaagtagtaaagtatgtatt

SEQ ID NO: 4755 - DNA, 1905 bp, Zea mays
cgcactcgctcgctcgctctcatacccagctgacaacgaagaggtttagagagagagagctgagagaatggccgacagcaggagaagtgtagtgtacgatgctgaaggcggcgacgatcatgagaggcaagggacggcgtggacggcgacgtcgcacatcgtggcggcggtggtgggctccggcgtgctggcgctggcgtggacggtggcgcagctggggtgggtggtgggtcccctcgtgctggtgggcttctcttgcgtgacctactacacgtcggcgctgctcgcagactgctaccgctacccggaccccgtccacggcgccgtcaaccgcgagtacatcgacgccgtccgatgctacctggaccggaagaacgtggtgctgtgcgggtgcgcccagtacgtgaacctgtggggcactctcgtcggctacaccatcaccgccagcgcaagcatgatcgcgattaagcgcgtcaactgcttccaccgggacggctacggcgccgccggctgcaacccgtcggggagcacgtacatggtggtgttcggtctcttccagctcctgctgtcgcagctgcccagcctccacaacatcgcctggctgtccgtggtggccgtggccacctccctgggctactccttcatcagcctgggcctgtgctccgccaagtgggcctcgcacggcggccacgtgcgcggcacgctgtcgggcgccgccgccgtggccggccgggtcgacgacgacaagcaggcggccttcaacgtgctcctcgcgctcggcaacatcgccttctcctacaccttcgccgacgtgctcatcgagatccaggacacgctgcgctcgccgcccgccgagaaccgcaccatgaagcgggcctccgcctacggcctcgccatcaccaccgtcttctacctcgcgctcggctgcaccggctacgccgccttcggcgaccacgcgccggggaacatcctcacgggcttcgccttctacgagcccttctggctcgtcgacgccgccaacgtctgcgtcgtcctgcacctcgtcggcgcctaccaggtcttcgcgcagcccatcttcgcaaggctcgagtcctgcgtcgcctgccgctggcccgacgccaagctcatcaacgccacctactacgtgcgcgtgccgccatgcctcctcctcctccgcacgtcgtcctcgtcgcccccgcccaccctgcccgtcgcgccgctcaagctcgtcctgcgcaccatcgtcatcatgttcaccacgctcgtcgccatgctgctgcccttcttcaacgccgtgctcggcctcatcggcgcgctcggcttctggccgctctccgtctacttccccgtcagcatgcacatggccaggctcaacatccgacgcggagagatccgctggtggatgctgcaggccatgagcttcgtctgcctcctcatctccgtcgccgccagcatcggatccgtgcacgacatcgtgcacaacctcaaggccgccgcgccattcaacaccgcaaactgattaataaccatgcatttactagtatatatacggatcggaggagtgatgggttaattagtttcttaattagctttggctactatatcagtataagaggagcagagggccggccacatgcatggcctttttgtgtttcttgattatctggcaaatttgatctgtcgagcagattttcatgcatgcatgcatgctgctaattcggacgtacgttgaactagtaataatattatatatttgtaatgtaaccccagcaatgcaatgcaagaagcaacaataatatttgccaaaaaaaaaaaaaaaaaaaaaaaaaaaaaaaaaaaaaaaaaaaaaaaaaaaaaaaaaaaaaaaaaaaaaaagaaaaaaaaaaaaaaaaaaaaaaaaaaaaa

SEQ ID NO: 4756 - DNA, 1768 bp, Zea mays
cgctcgctctcatacccagctgacaacgaagaggtttagagagagagagctgagagaatggccgacagcaggagaagtgtagtgtacgatgctgaaggcggcgacgatcatgagaggcaagggacggcgtggacggcgacgtcgcacatcgtggcggcggtggtgggctccggcgtgctggcgctggcgtggacggtggcgcagctggggtgggtggtgggtcccctcgtgctggtgggcttctcttgcgtgacctactacacgtcggcgctgctcgcagactgctaccgctacccggaccccgtccacggcgccgtcaaccgcgagtacatcgacgccgtccgatgctacctggaccggaagaacgtggtgctgtgcgggtgcgcccagtacgtgaacctgtggggcactctcgtcggctacaccatcaccgccagcgcaagcatgatcgcgattaagcgcgtcaactgcttccaccgggacggctacggcgccgccggctgcaacccgtcggggagcacgtacatggtggtgttcgggctcttccagctcctgctgtcgcagctgcccagcctccacaacatcgcctggctgtccgtggtggccgtggccacctccctgggctactccttcatcagcctgggcctgtgctccgccaagtgggcctcgcacggcggccacgtgcgcggcacgctggcgggcgccgccgccgtggccggccgggccgacgacgacaagcaggcggccttcaacgtgctcctcgcgctcggcaacatcgccttctcctacaccttcgccgacgtgctcatcgagatccaggacacgctgcgctcgccgcccgccgaaaaccgcaccatgaagcgggcctccgcctacggcctcgccatcaccaccgtcttctacctcgcgctcggctgcaccggctacgccgccttcggcgaccacgcgccggggaacatcctcacgggcttcgccttctacgagcccttctggctcgtcgacgccgccaacgtctgcgtcgtcctgcacctcgtcggcgcctaccaggtcttcgcgcagcccatcttcgcgaggctcgagtcctgcgtcgcctgccgctggcccgacgccaagctcatcaacgccacctactacgtgcgcgtgccgccatgcctcctcctcctccgcacgtcgtcgtcctcgtcgccgccgcccaccctcgccgtcgcgccgctcaagctcgtcctgcgcaccatcgtcatcatgttcacaacgctcgtcgccatgctggtgcccttcttcaacgccgtgctgggcctcatcggcgcgctcggcttctggccgctctccgtctacttccccgtcagcatgcacatggcaaggctcaacatccgacgcggagagatccgctggtggatgctgcaggccatgagcttcgtctgcctcctcatctccgtcgcagccagcatcggatccgtgcacgacatcgtgcacaacctcaaggccgccgcgccattcaacactgcaaactgattaataaacatgcatttactagtatatatacggatcggatcggaggagtgatgggttaattagtttcttaattagctttggctactatatctatcagtatcagagtcagaggagcagagggccggccacatgcatggcctttttgtgtttcttgattatatatctggcaaatttgatctgtcgagcagattttcatgcatgcatgcatgctgctaattcggacgtacgttgaactagtaataatattattatttgt

SEQ ID NO: 4757 - DNA, 1817 bp, Oryza sativa Japonica Group
cccttgcacactcattctctagagaagggagagagaagagtgtagtagtagctagctaggagaaagagagagatagagagagaaacaatggacaggagagcagtagtgtatgatgctgaagcagttgatgatcatgagagacaagggacggtgtggacggcgacgtcgcacatcgtggcggcggtggtcggctccggcgtgctggcgctggcgtggacggtggcgcagctggggtgggtggtggggcccctcgtcctcgttggcttctcatgtgtcacttactacacatctaccctcctcgccaattgctaccgctaccccgaccccgtcaccggcaccgccaaccgcgagtacatcgacgccgttcgctgctacctcgggccgaagaacgtgatgttgtgtgggtgtgcgcagtatgtcaacctgtggggtacacttgtcgggtacaccatcacagcgagtgcaagcatgatagcggtgaagcgggtgaactgcttccaccgggaagggtacggcgccggcgactgcggcgcgtcggggagcacgtacatggtggtgttcggcgtcttccagctcctcctctcccagctcccctccctccacaacatcgcctggctctccgtcgtcgccgtcgccacctccttcggctactccttcatcagcctcggcctctgcgccgccaagtgggcctcccacggcggcgccgtccgcggcaccctcgccggcgccgacctcgacttcccccgcgacaaggccttcaacgtcctcctcgccctcggcaacatcgccttctcctacaccttcgccgacgtcctcatcgagatccaggacacgctccgctcgccgccggcggagaacaagaccatgaagagggcctccttctacggcctctccatgaccaccgtcttctacctcctcctcggctgcaccggctacgccgccttcggcaacgacgcccccggcaacatcctcaccggcttcgccttctacgagcccttctggctcgtcgacatcgccaacatctgcgtcatcgtccacctcatcggcgcctaccaagtgttcgcgcagccgatcttcgcgaggctggagagctacgtggcgtgccagtggccggacgccaagttcatcaacgcgacctactacgtgagggtgccggggaggtggtggccggcggcgacggtggcggtggcgccgctgaagctggtgctgcggacgatcatcatcatgttcaccacgctggtggcgatgctcctccccttcttcaacgccgtgctgggcctcatcggggcgctcggcttctggccgctctccgtctacttcccggtgagcatgcacgtcgcccgcctcggcatccgccgcggcgagccgcggtggtggtcgctgcaggccatgagcttcgtctgcctcctcatctccatcgccgccagcatcggctccgtccaggacatcgtccacaacctcaaggctgctgcacccttcaagactgtcaactgatcgatgatcattaatttgatcgcttattaagtggttaaattattcagttaattaatgatcgatgatctagttgttagctcagcaacaagcaccatcagccatcagggagctgcctagctagagctgtggcctcattttgtttctaatttctttctctctgttttttttttggtgaatgattgatcgatctcaatgtactgaggttggttaatttttcttgctgctggttaatttgggcttaattttgatcttggagtaactagaaaacatgtaattcatcgtgttgaggatgagcaatgcaagaaagaaaataattattcgcc

SEQ ID NO: 4758 - DNA, 1844 bp, Zea mays
attattaaaatttgatttgaacctcacgatgcaaaggcacacgcgaatccgccccgcaatcgctgtcgtcgattctcccatctccactaaaagcatccgttggacggctggagtcattccggcgactcgagaaccgtccgacgtggaccaccaacgaaccgggaaatgcccgcatcttccagattctatacttccgccacgtgctccctcgcctccgcctccgcctcctcccgttccccacctcgccgccgccgcgtctccctcacgggccagtccccgagtacccccctcacgcgccacagtcgaaaccaaagcagctcgcggtggccacacccggacctcgggctcgacatggggttcctgctcgtgcgcaagccgcgtccgagggacgagaagccggacctggcgaactggatgcggtgcttcctgtcgcagcgtctgtctcagcccgccgcggcggcggaggagaccgcgaacgcggagggtaaggccgccgggagacgagaggaagaggagggtggcggggatgacgctgaccacctcgtcgtcatggtgaacgggctgtacgggagttctgcggattggaagtttgcagcagagcagtttgtcaagagattgccgggaaaagtctacgtgcatcgtagtcagagcaattattcaaaattaacatatgacggagttgacttaatgggtgaaaggctagcagaggaggttcgacaagttgttcagaggagaagaaacttgaggaaaatatcttttgttgctcattcacttggcggcttagtaacaagatatgcaataggaaaactttatgaacctgccatggatgaaacatcttcttgtgacattgataagccttctgatgaacaaaatgtacgtgatgttggtaaaatagctggtttggaaccaatcaattttattacatctgctacacctcacttgggctcaaggttgaataagcaacttcccttcctttttggtgtcccacttttggagaaaactgctgcaggaacagcacattttatagttggaagaactggtaaacatctattccttacagacaatgatgatgggaagcctcctcttctcctacgaatggttgaagattgtgacgacgggaaattcatgtctgctttgcgctgtttcaagcgtcgtgttgcctatgctaatgtaacatatgatcatatagttggttggagaacatcatcgcttcgacgtcaacatgaattaccaaaactcaagctaacagcaaacgatgaaaagtatcctcatattattaatgtcgataaaggaaatctagaggatcatcggcaagagggatctgtagaagattcactggcagatagttatgaagaggtgatgatccgtggccttacacaagtggcctgggaacgtgtggacgtatgctttcataagagttggctaagatacaacgcccataataacatccaggttaggatccatccaattaattcagatggagaagacgtcatataccatatgatagacaattttgtagtgtagccaagtagtccgtccggtgaatgccaactactacgtaaaagattactgctatttccagtggattcgccttgagaggtcattaatcttttaccatgtgggttgctatgcacaacagctagataattggcatcaatcagcacgtaactcatacgtgctgctaggtgattcgagcgtaggacctgtgcttgttggttgttgctggcaatgtaaatataagtgttaggtaatgcaaatatttgcatgacagtgcatattcttgtaaatgggaatttaccatgttattggaaatccaaagttcaaactgaaaaaaaaaaaaaaaa

SEQ ID NO: 4759 - DNA, 1554 bp, Zea mays
gtccccgagtacccccctcacgcgccacagtcgaaaccaaagcagctcgcggtggccacacccggacctcgggctcgacatggggttcctgctcgtgcgcaagccgcgtccgagggacgagaagccggacctggtgaactggatgcggtgcttcctgtcgcagcgtctgtctcagcccgccgcggcggcggaggagaccgcgaacgcggagggtaaggccgccgggagacgagaggaagaggagggtggcggggatgacgctgaccacctcgtcgtcatggtgaacgggctgtacgggagttctgcggattggaagtttgcagcagagcagtttgtcaagagattgccggaaaagtctacgtgcatcgtagtcagagcaattattcaaaattaacatatgacggagttgacttaatgggtgaaaggctagcagaggaggttcgacaagttgttcagaggagaagaaacttgaggaaaatatcttttgttgctcattcacttggcggcttagtaacaagatatgcaataggaaaactttatgaacctgccatggatgaaacatcttcttgtgacattgataagccttctgatgaacaaaatgtacgtgatgttggtaaaatagctggtttggaaccaatcaattttattacatctgctacatctcacttgggctcaaggttgaataagcaacttcccttcctttttggtgtcccacttttggagaaaactgctgcaggaacagcacattttatagttggaagaactggtaaacatctattccttacagacaatgatgatgggaagcctcctcttctcctacgaatggttgaagattgtgacgacgggaaattcatgtctgctttgcgctgtttcaagcgtcgtgttgcctatgctaatgtaacatatgatcatatagttggttggagaacatcatcgcttcgacgtcaacatgaattaccaaaactcaagctaacagcaaacgatgaaaagtatcctcatattattaatgtcgataaaggaaatctagagggtcatcggcaagagggatctgtagaagattcactggcagatagttatgaagaggtgatgatccgtggccttacacaagtggcctgggaacgtgtggacgtatgctttcataagagttggctaagatacaacgcccataataacatccaggttaggatccatccaattaattcagatggagaagacgtcatataccatatgatagacaattttgtagtgtagccaagtagtccgtccggtgaatgccaactactacgtaaaagattactgctatttccagtggattcgccttgagaggtcattaatcttttaccatgtgggttgctatgcacaacagctagataattggcatcaatcagcacgtaactcatacgtgctgctaggtgattcgagcgtaggacctgtgcttgttggttgttgctggcaatgtaaatataagtgttaggtaatgcaaatatttgcatgacagtgcatattcttgtaaatgggaatttaccatgttattggaaatccaaagttcaaact

SEQ ID NO: 4760 - DNA, 1143 bp, Sorghum bicolor; identical to SEQ ID NO: 1586

SEQ ID NO: 4761 - DNA, 930 bp, Sorghum bicolor
ctcttccgtaagcacttcccgaggaaacgaagacagagggaaggaaactgcagtgaagtcgccggcgccgccgcgacaggaggaaggagaaggagcggcagcggcagaggcaggcccggcgatctcggctgctgcggcgcggtaagggagggagcggagccgcgacaggatgcactcctttgggcaccgcgccaacgcggtggcaacgttcggggtcaccatactggccgcgatgtgcttcgccgcctccttctccgacaacttcaacaccccgacacccaccgcctccgtcaagatcttgaatataaactggttccagaaggaggccaacggcaacgacgaggttagcatgacgctgaacatttcggcagacctttcatctcttttcacgtggaacacaaaacaggtgtttgtttttgtggcagcagagtatgagactccacagaatgctttgaatcaagtttctctttgggatggtattatacctgcaaaggagcatgccaagtttttgatccataccacaaacaagtacagatttattgaccagggaagcaatctaaagggcaaggaattcaacttaacaatgcactggcacattatgccaaagactggcaagatgtttgcagataagatagtcatgacaggctatcggctccctgagcagtacagatagtcagggagatcatgaacaggagtggaggcctgcaagaagtgttagtggcagtggcatagctgatcctgagctttttgttctaatctaagtggaacatgtaatcttataagcatctacttaagctgaaccaggcgaaacaaagttgttatttgaggagatatatgtattgttcaactttgctttgcctataaaatgttgattctgaacttgaaattgtttgttggtctgaaactgtattgcaatcgcggagcactata

SEQ ID NO: 4762 - DNA, 841 bp, Zea mays
aaaaaggaagacagagaaggaaacggcagtgaagtcgccggcgccgccgcgacaggaggaaggagggagtagcagcggcaggggaggtccggcgatctcggctgctgtggcgcggtaagggaggaagcggagccgcgacaggatgcactcgtttgggcaccgcgccaacgcggtggcaacgtttgcggtcaccatactggccgcgatgtgcttcgccgcctccttctccgacaattttaacaccctgacacccaccgcatccgtcaagatcttgaatataaactggttccagaaggaggccaacggcaatgacgaggtcagcatgacgctgaacatttcggctgacctttcatctcttttcacgtggaacacaaaacaggtatttgtttttgtggcagcagagtatgagactcgacaaaatgctttaaatcaagtttccctttgggatggcattatacctgcaaaggagcatgccaagtttttgatccatacaacaaataagtacagatttattgaccagggaagcaatctaaagggcaaggaattcaacttgacaatgcactggcacattatgccaaagactggcaaaatgtttgcagataagatagtcatgacaggctatcagcttcctgagcagtacagatagtcatatagatcatgaacagtagcagaggcctgcaagaagtgatagttgcatagctgatgctgaactttttgttctaatctagttggaacatgtaatcttataagcttgtacttaagctgaaccaggcaaaactaagttgcaaatttgagatatttattgctcaacttttaagaataggtctcggttaatggtgag

SEQ ID NO: 4763 - DNA, 837 bp, Hordeum vulgare subsp. vulgare
gagacaggaaaaaaaaaacagagagagctttgcacgggattcaccggcgccgccgcggagcagcaagcacaggcaggcagcagcgagccccggcgagcgaggatgcactccttcgggcaccgcgcgaacgcggtggcgacgttcgccctgacgatactggccgccatgtgcttcgccgcctccttctccgacagcttcaactcccccacccccaccgcctccgtcaagatcctcaacatcaactggttccagaaggaggccaacgccaacgacgaggttagcatgacgctgaacatctccgccgacctttcgtcgctcttcacgtggaacacgaaacaggtctttgttttcgtggcagctgagtatgagactccacaaaatgccctgaatcaagtctccctttgggatggaatcataccggcgaaggagcacgccaagtttttgatccataccacaaacaagtacagattcattgaccaggggagcaacctgaaggccaaggacttcaacctgacgatgcactggcacatcatgcccaagacgggcaagatgttcgcggacaagattgtcatgacagggtaccagctacccgagcagtacagatagaccaccaccgtccctaaaagaacagctgctagccctatatatggtccgctgtgctgtgcaaacgcaggaagggttttagtggcagtgatgatgtagctggcgccaggcctttttttctctaatcttggcggggcaggacatgtaaacttgctcatgagcttgtatgtaagccgaatatgtgcaaggcgaatccgtattgttaactgtcgaatgcgaaactttgatgttacc

SEQ ID NO: 4764 - DNA, 681 bp, Glycine max
gggatcaaacacagagagcgcagtccaaccctcaaaatgcattcattcggctacagagccaacgcgttgctaacctctgccgtaaccattctggcgcttatgtgcgctatggcttctgtatccgacaacttcaacacccccactccctctgcacaagtccaggttctgaacatcaactggtttcagaaacaacccaatggcaacgacgaggtcagcatgacgatgaatatttccgcagacttgcagtcccttttcacatggaacacaaaacaggtttttgtttttctagctgctgagtatgaaactcctaagaattccttgaatcagatatccctatgggatggtatcattccctctaaagagcatgcaaagttttggattcatacatcaaataaataccgcttcatcgaccaggggagcaatttgcgtggcaaagaatataacctgactatgcattggcatgttatgccgaagactggcaaaatgtttgctgataaaatagtcatgccaggttatcgattgcctcaggaatatagatgatgcccttcatgttaagctttttgctgtaactttaacctttcctataacgaatatagaaggttggttcaaagaactagaaagaggaagggaatttgtgttttggaaagtgaaatcaatatcgcatgaatgaatacttgaaca

SEQ ID NO: 4765 - DNA, 792 bp, Glycine max
gggatcaaacacagagagcgcagtcgtagaagaaaagaaatcctcacaatgcattcattcgactacagagccaatgcgttgctaacctttgccgtcaccattttggctcttaggtgcgccatggcctctgtatccgacaacttcaacacccccactccctctgcacaagtccaggtgttgaacatcaactggtttcagaaacagcccaatggcaatgacgaggtcagcatgacactgaatatatctgcagatttgcagtcccttttcacatggaacacaaaacaggtttttgtttttctagctgctgagtatgaaactcctaagaattccttgaatcagatatccctgtgggatggtatcattccctctaaagagcatgcgaagttttggattcatacatcaaataaataccgcttcattgaccaggggagcaatttgcagggcaaagagtataacctgactatgcattggcatgttatgccaaagagtggcaaaatgtttgctgataaaatagtcatgccaggttaccgattgcctgaggaatatagatgatgctcgtcatgttaagtttttttgctgtaactttaacctctcctataacggatatagaaggttagttcaaagaactagaaagaggaaggaaatttgtgttttggaaagtgaaatcaatagctcttgatggaatacttgaacatccgagtttgcttgtggttttgaattgccccttgcgttagtctgaacttttttaattcctctggagaaaacgtatttatgctaaattgaaccctcctt

SEQ ID NO: 4766 - DNA, 1304 bp, Vitis vinifera
tttattttttctttctttttacttttcttccctattttccaaacatactctcgcggaagggaggcctttctccactccgaaggcacgattccaaaggcgaaggcatagtccggaagtcaattctcagtccaacgctgcaaaaccccaagaagcagcagcaatagaagaagaagaagatgcattcgtttgggtacagggccaactctcttctcaccttcgccgtcaccattctcgccgtgatgtgcgccatggcctccttctccgacaacctcaacaccccctcgccctcctcccaagtcgaggtgttgagtatcaattggtttcagaggcagcccaatgggaacgatgaggtcagcatgacattgaatatatcagcaaatctgcagtcaatgtttacatggaacacaaaacaggtttttgtatttctagcagctgagtatgcaacaccaaagaattccttgaatcaggtttctctctgggatggtattataccttcaaaagagcatgcgaaattctggattcataccacaaacaagtaccgattcactgatcagggaagcaatctccggggaaaagaattcaacttgacattgcactggcatgtcatgcccaagactggaaagatgtttgctgacaaaataatcatgaccgggttccgcttgccagaagaatacagataaggatgattctggggtgtttttttggctgtaacttcagtatttgtcccatggggatgtaagaggttattgaaattcgaaaatcagagaaaaagggaaaatttcctatttgagtcaatgactttttatttatgaggatattgcttagactttttgaatccatagaactttgttactgattcttggatcttgacccttccctcagatattcacatctatcttgtgaccatttttctgttcatatacaatttttccaggttggaatctcttttcctggtgtttggatgcaaaactaccaaatgggatttcttaggatttcttcaggaaaatcacttcgaaagggaaactcctcttcatgggaattttcttggtgcagttcatcaccgatgggattttccttttctcatcgccctccaaaaaggaaaagaaaaggaaaggaaaaggcccctcttcaatcgagaggaaatgactctgaagtgggctgtgttcttgtattctcagtcccatttagatagcattttgtttttagcttttggtaaaaagctactgattcattgatttctaaggacagtatactgtagttttaaattttctattaaatataaaataatatgatttataaataaa

SEQ ID NO: 4767 - DNA, 803 bp, Zea mays
gagaaggaaacggcagtgaagtcgccggcgccgccgcgacaggaggaaggagggagtagcagcggcaggggaggtccggcgatctcggctgctgtggcgcggtaagggaggaagcggagccgcgacaggatgcactcgtttgggcaccgcgccaacgcggtggcaacgtttgcggtcaccatactggccgcgatgtgcttcgccgcctccttctccgacaattttaacaccctgacacccaccgcatccgtcaagatcttgaatataaactggttccagaaggaggccaacggcaatgacgaggtcagcatgacgctgaacatttcggctgacctttcatctcttttcacgtggaacacaaaacaggtttccctttgggatggcattatacctgcaaaggagcatgccaagtttttgatccatacaacaaataagtacagatttattgaccagggaagcaatctaaagggcaaggaattcaacttgacaatgcactggcacattatgccaaagactggcaaaatgtttgcagataagatagtcatgacaggctatcagcttcctgagcagtacagatagtcatatagatcatgaacagtagcagaggcctgcaagaagtgatagttgcatagctgatgctgaactttttgttctaatctagttggaacatgtaatcttataagcttgtacttaagctgaaccaggcaaaactaagttgcaaatttgagatatttattgctcaacttttaagaataggtctcggttaatggtgagaagacttttcaccaaaaaaaaaaaaaaaa

SEQ ID NO: 4768 - DNA, 965 bp, Ricinus communis
ttctcagacactaaaacggcaacagcgcatcaacagcgacgacacacaaagtgtctactacttcccttgaatcggagcagtagctgcagcgagcaattagggtttaaactacagtagaaacagttgaaacaaaaaaatgcattcgtttggttacagagcaaatgctttgctaacgttcgccgtcaccatcctggcgctaatgtgcgccatggcttctctctctgataacctaaattcgccggctccttctgcccaaatccagatattgaatatcaattggtttcagaagcagccgcatggaaatgatgaggtcagcctcactatgaatataacagctgatttacagtcattatttacatggaacacaaagcaggtttttgtgtttgtagctgcagagtatgcaaccccaaagaatgccttgaatcaggtttcactttgggatgctattatacctgccaaagagcatgcaaaattttgggttcagactgcaaacaagtatcgttttgttgaccagggaagcaatcttcgtggtaaggaattcaatttgactttgcactggcatgtcatgcccaagactgggaaaatgttcgctgacaaactagtcatgcctggataccgcttgcctgaggaatatagatgaacagaatagtgtttttgatgtactttgtagctgtaacttgagcggttttaatatggaatgattaagttcaggagaattaaaaaagaaaacctagtacacagaaaccttcattattggcatagaaattgaatgctgtttggattatgggtacttttgtcatcttttttagtttctttatctattggttttgtaggtattgctgttaaatttaaatgctggcaggccaatggctaagagaaagactaatgggaaactccttgtgggcgtgagaacattcatctagccaaagctttagtgaatgtgaaaatctgatagcaatcgttcg

SEQ ID NO: 4769 - DNA, 1143 bp, Sorghum bicolor; identical to SEQ ID NO: 1586

SEQ ID NO: 4770 - DNA, 1697 bp, Zea mays
gaaccgtccgacgtggaccaccaacgaaccgggaaatgcccgcatcttccagattctatacttccgccacgtgctccctcgcctccgcctccgcctcctcccgttccccacctcgccgccgccgcgtctccctcacgggccagtccccgagtacccccctcacgcgccacagtcgaaaccaaagcagctcgcggtggccacacccggacctcgggctcgacatggggttcctgctcgtgcgcaagccgcgtccgagggacgagaagccggacctggtgaactggatgcggtgcttcctgtcgcagcgtctgtctcagcccgccgcggcggcggaggagaccgcgaacgcggagggtaaggccgccgggagacgagaggaagaggagggtggcggggatgacgctgaccacctcgtcgtcatggtgaacgggctgtacgggagttctgcggattggaagtttgcagcagagcagtttgtcaagagattgccgggaaaagtctacgtgcatcgtagtcagagcaattattcaaaattaacatatgacggagttgacttaatgggtgaaaggctagcagaggaggttcgacaagttgttcagaggagaagaaacttgaggaaaatatcttttgttgctcattcacttggcggcttagtaacaagatatgcaataggaaaactttatgaacctgccatggatgaaacatcttcttgtgacattgataagccttctgatgaacaaaatgtacgtgatgttggtaaaatagctggtttggaaccaatcaattttattacatctgctacacctcacttgggctcaaggttgaataagcaacttcccttcctttttggtgtcccacttttggagaaaactgctgcaggaacagcacattttatagttggaagaactggtaaacatctattccttacagacaatgatgatgggaagcctcctcttctcctacgaatggttgaagattgtgacgacgggaaattcatgtctgctttgcgctgtttcaagcgtcgtgttgcctatgctaatgtaacatatgatcatatagttggttggagaacatcatcgcttcgacgtcaacatgaattaccaaaactcaagctaacagcaaacgatgaaaagtatcctcatattattaatgtcgataaaggaaatctagaggatcatcggcaagagggatctgtagaagattcactggcagatagttatgaagaggtgatgatccgtggccttacacaagtggcctgggaacgtgtggacgtatgctttcataagagttggctaagatacaacgcccataataacatccaggttaggatccatccaattaattcagatggagaagacgtcatataccatatgatagacaattttgtagtgtagccaagtagtccgtccggtgaatgccaactactacgtaaaagattactgctatttccagtggattcgccttgagaggtcattaatcttttaccatgtgggttgctatgcacaacagctagataattggcatcaatcagcacgtaactcatacgtgctgctaggtgattcgagcgtaggacctgtgcttgttggttgttgctggcaatgtaaatataagtgttaggtaatgcaaatatttgcatgacagtgcatattcttgtaaatgggaatttaccatgttattggaaatccaaagttcaaact

SEQ ID NO: 4771 - DNA, 1299 bp, Oryza sativa Japonica Group
atgcccgcgtcttccagactcaacccctcctccgccacgtgctccctcgccgccgcctccgcctccacctccgcctcgcctcgccgccgcggccgcggccggcggcccgcctccgcgatgggccaggccccgagctcgccgccggggccggggcgcagccgcagccgcggaatctcgagatggccgccgccgccgccgccgctgcaggggctccgcctcgacctagggttgctgcttggccgcaaggcgaggacgaggtccgggggcgggaagctggacctggcgaactggctgaggtgcttcgtggcgcctcccctgccgcagccttcggaggcggaggcgagcgccgaggggagggacgcggggaaccgcgaggaggaggaggccgggaatgaggaggccgatcacctcgtcgtcatggtcaacgggctgtacgggagttcggcggattggaaatttgctgcagagcagtttgtgaagaggctgccggggaaagtcttcgtgcatcgcagtcagtgcaaccattcaaagttaacatatgatggagtcgacttgatgggagaaaggttagctgaagaggttcgacaagttgttcagaggagaagtaacctgcagaagatctcttttgttgcccattcacttggtggtttagttacaagatatgcaattggaaaactgtatgatccatcaataaatgaagaggcttctcttgataaagaaaacttctcaaatgaactgagaacatctgatggtggtaaaatagctggtttggagccaataaattttattgcagttgctactccacacttgggatcaaggtggaataaacaacttcccttcctttttggtgttccacttttggagcgaactgctgcagtaactgcacattttatagttgggagaacagggaaacatttattccttacagactcagatgatgggaagcccccacttctcctacgaatggctgaagactgtgatgatggaaaattcatgtctgcgttgcgctcttttaagcgccgtgttgcctatgcgaatttgcagttaacaccaagtgataaaaagtatccacatattatccatgttgacaaaggaaattcagagcatcatcagcaagaggaatctgtagaagcttcacttacagatagcatggaagaagtgatgatccatggccttacacaagttccctgggaacgtgttgatgtatgctttcataagagctggctaagatacaatgcccaccacaatatccagattctttttgtgaaacataatctaagactgataactgaccagtaa

SEQ ID NO: 4772 - DNA, 1580 bp, Hordeum vulgare subsp. vulgare
gcggctctgcgcttacgccacgtgctccctcgcggcctcccccgtccccacccccccttccccgccccgccgccgccgccgccgccgccggctcgcctcctccatgggccagtccgcgagctcgccctcgggcggcggccgcggcgactcgcggtggccggcgctccggctcgatctagggttgccgcccggccgcaagcagaggccggcgggcgagaggctgaatttgggggaccggctgcgccgcgcgctgtcgcggccgtcgccccagaacacggaggtggagattgaggccgaggaggaggggcgagacgccggaaaccgcgtggaggtggaggccggcggcgcggaggccgatcacctcgtcgtcatggttaacgggctctacggaagctcggcggattggaagttcgcggcggagcagttcgtgaagaagctgccggggaaagtctatgtgcatcgtagtgagtgcaatcattcaaggttaacatacgatggagttgatataatgggcgaaagactggctgaagaggtacaccaagttgtccagaggaaaggaaatttgcggaaagtctctattgttgctcattcacttggtggattgatttcaagatatgcaattggaagactctatgaagaatcaacaagcgaagagccatgccttaatatggagaagcattctgacaaagaaaatataagcaggggtggtaaaatagctggcttagaaccaatgaacttcattgcgtctgctacaccacacctgggctcaaggtggaataaacaactgcccttccttttcggtgttccacttttggaacaaaccgctgcagaaactgcacatcttatagttgggagaacgggtaaacacttgtttctctcggacagggacgacgggaagcctccacttctcgtgcgaatggttgaagattgcgatgatggaaaattcatgtcagctttgcgctcttttaagcgccgtgttgcgtatgcaaatataacatatgaccatatagttggttggagtacatcgtcgattcggcgacaacacgaattacctaaacttgagttaacagcaattgatgaaaagtatccgcacgttatccatgttgatactgctaactcagagggccctcagcaagaggatcctgtagaaacttcgctcacggatagccttgaagaggagatgatccgtggccttaaacaagtgacctgggaacgggtcgatgtatgctttcatgagagccggctaaaatacaatgcacattacaatatccaggttaggaccccaatgaacttggagggagaagatgtcatctaccatatgatagacaattttctagtctagactggcccgtcatgtggattatttccagtggattcagctggaaaagtaacctgtcgtctatatgacggcataactccattctagttagattatcgattgatttcctggcaggccatcatacatgatggtttctgggagcatacacagtcagtgatcacaacatgtgacctcctgaatattgtagacttgggtcacaattctgtaaatattagcccaatggtgtcaaatttcttttagt

SEQ ID NO: 4773 - DNA, 859 bp, Zea mays; identical to SEQ ID NO: 1587

SEQ ID NO: 4774 - DNA, 803 bp, Zea mays; identical to SEQ ID NO: 4767

SEQ ID NO: 4775 - DNA, 3201 bp, Cucumis melo subsp. melo
cattcatttgggttcagagccaacgctttgctgaccttcgccgccaccattctcgccgtcatttgtgctttggcttccttttccgataccctcaattccccttcacccactgcacaagttcaggtctcccttcttcttctttccccctctttctgggttctttttcctttccattttagatctgtggattcatttttcttggatttcgacacccatttggtgatttgatttgggttttcttgtttttgtgtcttaggttctgagcatcaattggtttcaaaatcaacccaatggaaatgatgaggtatgatctcatggactttcttgtttctttagcatttgatgaaatggggttctattgggtttgtgaaaatttgtttgagaagaaggaatgaagggcatttcagtttcctaacgtgttgagctttaggggtcctttttctccctctttttccttttgtactgcatgatttgttatttgatgtgatgaaatggggcatttgtgtatttgaaattatggaaagttgttggggaaaaggcccaagttggttatcggagaacgtgtagtctagaaaaatagggcacgtacctgtgaatgttgatgttggttgatccttgttcgactactgtctcgcccgcagccagtcaaaaaaggtaagactttcccttgtgtgtatgaaaatcatggttgggtaacttatctgaggtttcgtcttcttaggattgggataagttccatgttttacttagattttgctgttaattataagaggcaaaagaacgtacggatgcaaaaagtttaatggagttccaaagctcgtcaaggctaatcacctccttgttgaagatcttgttgttcttctcgagctataacttccacagcattgccaggataccatcagaccaaataactatgaccttactcctgatgagagtaccaaaaatgaattgaaatgaagcctcttcactcctcctagggaagcaccagcttagaccgaacagacttaaaccatattttgttgttttttctttgtatgtataggaaacaatatttagctggtctttaatccagtcgaatgctgtttcttcttatctgatggacagccgtgtttttcttagataaatgatagtgggttggctgtaatcttgattaggggttctgtaatttcattaagagtatttttaactgtatcatttttaactctctcaacctggttgagatgtttgggtgtgcctcaagatcctctctctcctcccctttttttaggcttctctattattctcattttataaatctcttgaactttgagtcttacattaataaagaaacttgcctccgtttcaaaaaaaaatcttagcaaaattggttactagatggatttttagatacacaaatatatgaattatgaggagcaatttattaaatatgtcaagtatatgcgtgaatatattgagaaagtaaagatcccacaggatagtataataaagaggtccttttctcactctaggtaagaaagtgatcgaggaaagtaaaagttaaaagaggacttctttctgttgagttctttgaaacaataggtttcttttgtttgattgtgtaagtgtgagattgagtgtgaataagtttcttggagctaacattttcccttaagctagacttccgtgactccatcatcttcatgaacgagtcatttgtcaaggcttttgatgaatatgtacgtaatatcatctcctcccttatagttatattgagtaattattctctatttatgatcagatctctagggaaattatatttgatttttttgtgattattcccttcgtgaaaaggtggacttggtgtgagcggttgacatgcttattatcctgaaacaatgtactcctttcttcttgaaggacactttggttcttcagaagcactttggtcaatgacgaggcactgaaaaaaaatcaattttttggcgttgataggcacaagcacattttttagaaggggattgatgggagtttattttcataaaataatgcaattactctttcttgattatttgaaagaatgcttctttttgcaggttagcatgactttaaacatatcagcggacttgcagtcattatttacgtggaatacaaagcaggtgcaatggcaaactattttcttcttttgctttctctcattatcctttctacagtctggttggttaattatggtggttataaataattagttgataaaattcgtttgtttattcacactgagtgttccatagttgaagaattcaagctataccctcttgactcgttctctcccaccaatctaactgaactagttacattaagcgccagccgactccttatgttcatactaaatcctaagtcattctccccttactttcttacttctatatactcttaactatctgccgtggagggtctattataaacgtcatacaaattgtcataatccctgaagttaataggtttcaaatagctggatgtccatttggcacagggcggtcattgtcgcttcttccctttatttgtatattctgtgaactacgtcattcaagttaataatggcgttggggatcacaagggtttcatctgtttatatacatatttcttgagattctttcttgagattcggcagtgttatcataatcttcattttaatatgtgctacaggtttttgtgtttcttgctgctgaatatgaaaccccatcgaattccttgaatcaggtgagtttctgctcatctcttttgtcaacttgactcgccttaggtttttgcctttctcatgactgaaatcacaaaagttcacatatttcattatacggagcttcttcatacatttacttcaatttaatccctttccaaaatgcggtttctagatctcactttgggacggtatcgtaccttccaaagagattgcaaagtttcaaatccatacatcaaacaagtatcgctttgttgatcaggttggtcatctccagtccttttgcaaagccttctccaacctgtttatgatgattagtaagatttaaaccgaaaagtgactaacttgtatttctccatgttcagggaagcaatctgagaggtaaagagtttaacttgacgttgcattggcatgtgatgccaaagacaggcaagatgttcgcagataaattggtgatgtctggatatcgtttgccacaagaatataga

SEQ ID NO: 4776 - DNA, 1965 bp, Sorghum bicolor; identical to SEQ ID NO: 1588

SEQ ID NO: 4777 - DNA, 2315 bp, Zea mays
catggctgtgccacccacactaatcacccccccaaatcgaccacccctccctctccctctcttaagatcgccggcgaggggagagccgagaggcgcagggcagcccccgccgacgcttccgctcccgctcccgccgctgccgcagccgcagccgcagccgcagccgtagcggcattttgtcgagcatatggcgctcgtgcccagcggcggcgcgggcgcttgcaaggacgaggccgcccttgggctcccgtggtccgaaatgttccgctccgcctcgcgccgccggcccaagcaggagtccgacgatgcgccgcccaagaagcccgcgctgaagacggcgggtgccaaggagatgaaggccaagccgtcgtcggtagggactggagctggggcaggagccgacatcgcagggctgtcgctggagcccgacgcgcgcctggcgctctacatcgccatggcgcacgcgggcctcgccaccgcgctgctcgtgctctacggcctttacctgctgctcgccgacttcctccgcccgctgcagtgggcgttgctctgctccgtcccgctccgcgagacgcagcgcgcgctcgtcgccttctgggagcccccgctccgtggcggactcagcgccgcactgctcgcgctgccactcgctgtgctccggtcctcgaccgcaacgctcgccgacgcgcgcgccgcgctcctgcgccgcccgctcccgtcatcgccggcgttcccgcgcctcctccgctggctcgtctccttctttttcttcctcatcctcttcgagcgcctcggcgccgccaccgcgctgctgctcctcgttttcgcgctcgcattcttcgccgcgtcccccaagctcaaacgcgctgcctcctcacgcatctccggtcggcctccctcctctcgcggcctcctattaactggaggcatcctccgccaccttaagacactagtcgctcttggtctcatgcttggtatgatcgctgggttcataactggcagcatcttcttctcctacaagattgggctagagggcaaggacgccgtcatgtccctcaagtcccatgtcgagaagagcaactactcagagaagattggcttgaagaagtggatggacgacaatgacattcctggcttggtcgatcagtattctgccaagatctatgacaccttgtgggagcaggtcgaccaattggctgtgcagtacaaccttacagatttcactagtggcttccggcatttcttgatcagccaatcagttgaccccaaaagcaaggcgctcatcagttccagaccgcacccatactcaatgaagttgcaatcaattgcgacacgtgtgagaaacagagaatgggtggagatttactgggagcttgactcattctttagggagctgttaatcacaagagaggatttggtcatcaaggccaaagagcttgctttgcagggaacagaaatcgcaaagaggcttctgtccagcagcacatcggtgctgggcggtagtgccaatttgatgttgtcaatcaccctccgcattgtctcaggtgcggctgaggttgttaatttcctgtcacaactgatggtgttcttgtgggtgctgtattaccttattactgtggagggaggtggagctacagagcaaatcattgatcttttgccagtgtcaaaacaagtaaaggaccgctgtgttgaggtcatggatcatgccatcagtagtgtattgttggccactgccaagattgccatattccagggggggctgacatggctattgttcaagttcttcaaagtgcattttgtgtacacatcaactgtgcttggattcataagtgcacttgtgccaatacttccattttggctgtcctcgatatttgccacagggcagcttctcatggaagggagatatgttcttgcactggtggtaactgtgatacacctcatgctcatggattatggcacaactaccattctggaggatatacctgggtacaatgggtatctcaccggcctcagcataattggtggcatgacactgtttcccaatgcactggagggtgcaatattaggtccccttataatgacggttgttatagcgttgaagaacttgtacacagagtttgtacttgctgatggagaggagacgagcagctagcatcagatgcaaggctaaaatgcttgtgttgccaaagaaatacttgtgtagggcttctacatgcaatgttgcatgatggttttgctcttgtaccatgccttatatgcacagctattgcagcagttgtgagctttccttgttaatatctattggatcgttccat

SEQ ID NO: 4778 - DNA, 1947 bp, Oryza sativa Japonica Group
atggcgctcgtggctaagggtgagcccaacggaggcgcgtgcaaggacggggaggtgatggacctcccctggtcggagatgttccgctccgcgtcgctgcggctgccgaagcaggaggagccgacgacgacgaagaagccgcaggggaaggggaaggcgtcggcggcggaggaggatatcgggggcttgtcgctggagcccgacgcgcggctggcgctgtacatcgcgatggcgcacgcggggctcgccacggcgctgctcgtggtgtacgggctgtacaggctgctcgccgacttcctccgcccgctgcagtgggcgctgctctgctccatcccgctcagggagacgcagcgcgcgctcgtcgccttctgggagcccccgctccgcggggggctcggcgccgccgtgctcgcgctcccgctcgccgcggtgcgctcgtgcggcgccacgctcgccgacgcgcgcgccgcgctcctgcggcgcccgctcccgccgtcgccgtcgttcccgcgcctcctccgctggctcgcctcctccttcctcttcctcctcctgctcgaccgcctcggcaccgccaccgcgctggtcctcctcgccctctccctcgccttcttcgccgcatcccccaagccctcctccttcctatcccgcgccgcctcctcccgaatcgccggacgaacaccctcctcccgctgcctcttccttaccggcggcatcctccgccacctcaagacgctcgtcgccgtcggcctcatgctcgggatgatactcgggttcctatccggcagcgtcttcttctcctacaagattgggctcgagggcaaggacgctgtcatgtccctcaagtcccatgtcgagaatggcaactactctgaaaagattggcctcaagaagtggcttgacgacaatgacatccccggcttggttgatcagtattccgcgaagctctacgataccgtgtgggagcagatagatcagttagcagtgcagtacaaccttaccgatttcactagcggattccggcatttcttgatcagccaatcagttgacccatctggtgcaaagggcaaggagctcatcacatccggaccacacccgtactcgatgaagctacaggttattgcgaagcatgtgaagaacagggagtggatggacatttacagggagctggactcattctttagggagctgttaatcacaagggaggatttggtggtgaaggccaagggattggcattgcagggggctgagatcgcaaaaagtctgctgtctagcagcacatcggtgctcggtggtagtgccaatctgatgttatccattactctccacattgtctctggtgcagctgaggtgctcaattttgtgtcacagttgatggttttcttgtgggtgctgtactacctcatcactgtagagggaggtggggctacagagcaggtcattgatcttttgccattgtcaaaacaagtaaaggatcgatgcgtcgaggtcatcgaccatgccattagtagtgtcttgttagccactgccaagattgccattttccagggatgcctgacatggctgttgttcaagctcttcaaggtgcattttgtgtacacatcaactgtgtttgcaatcatcagtgcacttctgccaatactcccaccatggttgtcctcgatatttgccgcaggacagctgctcatggaagggagatatgtgctcgctattgtggtgacagtggttcatctcataatcatggattatggaactacagtcattcaggaggatatacccgggtacaatggatatctcactggccttagcataattggtggcatggcattgttccccaatgctctggagggtgcaatattaggtccccttataatgacagtggtgatggcattgaagaacctgtacacagagtttgtgcttgctgattcagaggagaccagcagctag

SEQ ID NO: 4779 - DNA, 2285 bp, Hordeum vulgare subsp. vulgare
ggtccccgattccatttccaccacctctccggcgcggggcggggcggaccggagcgggcgaggcggccagggtttcccacgccccaccgccgccgccgccgcattccgtccaccgcatggcgctcgtgcccagcggcggcgaccaggccgcggcctgcaaggccaccatcccctggtccgagatgttccgctccgcctccgtccgccgccccaagcaggcggaggacccgcccaagcccgcgcccacgccgccggggaagaaggcggcgccaccgacggccgaggccgaggggctgtccctcgagccggacgcgcgcctggcgctctacatcgccatggcgcacgcggggctcgccacggcgctgctcgtgctctacggcctctacctgctgctcgccgacttcctccgcccgctgcagtgggcgctgctctgctccgttccgctccgcgagacgcagcacgcgctcgtcgccttctgggagccgccgctccgcggcgggttcagcgccaccgtgctcgcgctcccgctcgccgcgctgcgctcctgcgcagccaccctcgccgacgcgcgcgccgcgctgctgcgccgcccgctgccgccgtcgccgtccttcccgcgcctgctgcgctggctcgtctcatccttcttcttccttctcctgctcgagcgcctcggcaccaccgccgctctcgtcctcctcgccgtctccctcgccttctacgccgcctctcccaagccctcctctttcatcccccgtgccgcctcctcccgcatctccggtcgaacaccctcatcccgcggactcctcctcaccggcggcatcctccgccacctcaggaccctcgtcgccgtcggcctcatgcttggcatgattgctggcttcctaggaggcagcgtcttcttttcctacaagatcggactcgagggcaaggacgccgtcatgtccctcaagtcccatgtcgaaaatggcaactactctgaaaagattggcctcaagaagttgcttgacgacaatgacatcccgggcttggtggagcagtactcggggaagctcgtcgaaaccgtctgggagcaggtagaccaattggctgtacaatacaaccttactgatttcactagtggattcaagcacttcttgatcacccaatcagtcccatctggtgccaagagcaaggagctcatcacctctggaccgcacccctactcgctaaagctgcaggccattacgctgcgtgtgaagaagagggagtggctggagatctacaaggagctggactcattcttcagggagctgttaatcacaagggaggatctagtggtcaaggccaaggacctggctttgcagggcacagagattgcaaagagtctgctgtctagcggcacctctgtgctcggtggtagcgccagtttgatgctatccattgctctccgcattctctccggtgcagcagaggtgctcaattttgtgtcacagctgatggtctttatgtgggtgctgtactacctcatcaccgttgagggtggtggtgcaacagagcaggtcattgacctattgccagtgtccaaacaagtgaaggagcggtgcgtcgaggtcatagaccatgccattagcagtgtcttgttagccactgccaagattgctatattccaaggatgcctgacatggctgttgctcaagttcttcaaggtgcattttgtgtacacagcaactgtgtttacaatcatcagtgcacttttcccaatactaccagcatggctgtcctcgatatttgccgcagcgcagctgctgacggaagggagatatgtactcgcggttatggtaacagtgatacaccttgtgatcatggattatggaaccacagtcattcaggaggatatacctgggtacaatgggtatctgactggcctaagcataattggtggcatgacgttatttcccaatgctctcgagggtgcaatactgggcccccttattatgacggttgtgatagcattgaagaacctgtacacagagtttgtgcttgctgatacagaggagatgagtagctagcgttggatggaaggcaacatgtatgaggagaatgcatgcgtaggacctatactctgcatttccatgttggcttttcctttgtaccatacccgggtatacaagatactgcatcagctgtgattcgttcctccttgtaattttgccctctttgtggtgcaacttaatgtctatcgggttttccgataggtctggttttgatatgcatgggattggccctctgtttgattgatgcag

SEQ ID NO: 4780 - DNA, 2291 bp, Sorghum bicolor
actgacgccgcgcgccccacctacccctcggcccccgccctcctcgcccagtgggtcggtcctccgcatctcccatctcccatccctcgtgttctcccgcttccgcctcccctccgatctcctccgccgcatccacctcccccgaaccctagacccactcgcgcgcgcccattggcctccggtcgccatgtccgccgctcatcttctccgtcactcccgcaagctgcggagtttgcaaaatgctgtgggttgtgagaattttagtcttgttcggcatttctccagcggttccggatccgttatcgccaaggaaaatggtgttggaaaaagaaccagaggtaccagattttcccagcataaccagcctgcaaaagagctcgagacattctcactaggagtaaatggaagctgcacttggagaagagcatccaacagccttaccccaagtgctgctagcaggctcaatggttcattctcatgtggacaggtagtttcagctcgtccattctcaagtagtgcagacctgcctccacatcaagaaattggcatgccgtctctttcgcctacaatgactgagggaaacattgccaagtggcttaagaaggaaggagacaaggtctcccctggtgaggttctctgtgaggtggaaactgataaagccactgtggagatggagtgcatggaagagggctatcttgctaagattgttcaaggagatggtgcaaaggagattaaagttggcgaggtcattgctataactgtggaagaagagggtgacattgagaagtttaaggattataagccgtcatcttcagctgaacctgtagctcctgctgaatcaaaggctcaaccagaaccatcccagccgaaggtggaggaaaaaaagcttacccaggctcctgaggccaaggccccgaagattgaagatgcttctcaatctggagatcgtatatttgccagccctcttgcccgtaaactggctgaagataacaatgtcccactatcaagtgtgaaaggtactggtcctgatgggcgtattttgaaggcagatattgaagattacttggccaagggtgggacgagggaggcttttgcagctccagggttaggttatattgatattccaaatgcacagataagaaaggttaccgcgaaccgcttgctacaatcaaaacagaccattcctcattactacttgacagtagatgcacgtgttgacaaacttgtcaagttgcgaggtgaactgaacccgctgcaggatgctgctggtggaaagaaaatatcaattaatgatcttgtcatcaaggctgcagctttggctcttcgaaaggtcccacagtgtaacagctcatggatgaatgattttattcgccaataccacaatgtaaacatcaacgtggccgttcagactgaacatggattgtttgttccagtaattagggatgcagacaagaagggacttggtacaattgctgaggaggtgaagcagttggctcaaaaagcaagagataatagcttaaaaccagcagattacgaaggtggcaccttcaccgtatcaaacttgggaggtccctttggaattaaacaattctgtgccatcataaatcctcctcagtcagcaattttggccattggttctgctgagaagagggtgatacctggttccgctgacggtcagtacgaatttggttcattcatgtcagctacactgagctgtgaccacagggttatagatggtgcaattggtgccgaattcctgaaagcattcaagggctacatcgagaacccgacctcaatgctactgtgaagggatggatgacctaacacatttcttgttaagctgttaaataaccaggccagccaaagtggcgtttccaaaccaatagcacagagccgtcttctctgttttgatattgccagtgttaagtaggatcaacgtatacaggccttattgaggtcatttttgggtttgtcctcacggacaattgatgggaataaatatgtaagaagccaacgtgggaaggaactctttgatttttcgaacattgcgactagaaaaactgtaaatttgttgaggttttccacagtaagcgtgatttgatgcgttgatgatatcttgataagggtcgtagtcatggattcagttaagatgttgtgatgcatgctcgtcagctgcaatgtaagcaacgtggaaggaaaaggttggtcagaaaggtgctaaataacagcttcctaagagcatctcaagcaatcctctttttcaaacccccaatgagtaaaaactgacattt

SEQ ID NO: 4781 - DNA, 1968 bp, Zea mays
tccgatctccgccgcatcacctccctcgaaccctagacccacccgcgccccccattgcctccggccgccatgtctgccactcagcttctccgtcgctcccgcaagctgcagagtttgcaaaatgctgtaggttgtgagaatttttttctttttcggcatttctccagtggttccggatcctttatcgccaaggaaaatggtgttggaaaaagaaccagaggtaccagattttcccagcaataccagcctacaaaagagcttgaaccattctcactaggagtaaatggaaactgcacttggagaagagcatccaacagccttaccccaagtgctgctagttggctcaatggttcattctcatgtggacaggtagtttcagcacggacattctcaagtagtgcagacctgcctccacatcaagaaattggaatgccttcactttcacctaccatgactgagggaaacattgccaagtggcttaagaaggaaggagataaggtctcccctggcgaggttctctgtgaggtggaaactgataaagcaactgtggagatggagtgcatggaagagggctatcttgctaagattattcatggagatggtgcaaaggagattaaagttggtgaggtcattgctataactgtggaagaagagggtgacattgagaagtttaaggattataagccgtcatcttcagctgaacctgtagctcctgctgaatcaaaggctcaaccagaaccttcacaaccaaaggtggaggaaaaaaagcttacccaggctcctgaggttaaggccccaaagattgaagaagcttctcaatctggagatcgcatatttgccagccctcttgcccgtaaactggctgaagataacaatgtcccactatcaagtgtgaaaggtactggtcctgatgggcgtattttcaaggcagacattgaagattacttggccaagggtgggctgagggaggcttttgcagctccagggttaggttacgttgatattccaaatgcacagataagaaaggttaccgcaaaccgcttgctagcatctaaacagaccattcctcattactacttgacagtagatgcacgtgttgacaaacttgtcaagttgcgaggtgaactgaatccactgcaggatgcttctggtggaaagaaaatatctatcaatgatcttgtcatcaaggctgcagctttggctcttagaaaggtccctcagtgtaacagctcatggatgaatgattttattcgccaatatcacaatgtgaacatcaacgtggctgtgcagactgaacacggattgtttgttccagtaattagggatgcagacaagaagggacttggtacaattgctgaggaggtgaagcagttggctcaaaaagcaagagacaatagcttaaaaccagcagattatgagggtggcaccttcacggtatcaaacttgggaggtccsttcggaatcaaacaattctgtgccatcataaatcctcctcagtcagcaattttggctattggttctgccgagaagagggtgatacctggttccgccgatggcctgtatgagtttggttcgttcatgtcagctacactgagctgtgaccacagggttatagatggtgcaatcggtgcggaatttctgaaagcattcaagggctacatcgagaacccgacttcgatgctgctgtgaagttaggatcgacgacctaacacaattcttgtcaagttgtttaaataaccaggccacccaaaggtggcgtctccaaaccaatagcacagagccgttatgatattcccagtgttaagtaggatcaacgtatagaggcctgaagtcatttttgggattgttctcacgggcaattgatgggaataaatatgaaagcagccaacatgggaaagaactcattgatttttttctttggaacattgctatgcgatttaaaaaatcgtgtaaaaaaaaaaaaaaaaa

SEQ ID NO: 4782 - DNA, 1981 bp, Zea mays
ccgtctcccctcttcctcctcccctgcgatctccaccgcatcacctccctcgaaccctagacccacccacgcgcccattgccttcggtcgccatgtccgccgctcagcttctccgtcactcgcgcaagctgcggagtttgcaaaatcctgtaggttgtgagaattttagttttgttcggcatttctccagcggttctgggtcctttatcgccagggaaaatggtattggaaaaagaaccagaggtaccagattttcccagcataaccagcctgcaaaacagctcgagacattctcagcaggagtaaatggaagctgcacatggagaatagcatccaacagccttaccccaagtgctgctagctggctcagtggttcattctcatgtggacaggtagtctcagcacggccattctcaagtagtgcagacctgcctccacatcaagaaattgggatgccgtctctttcacctacaatgactgagggaaacattgccaagtggcttaagaaggaaggagacaaggtctcccctggtgaggttctctgcgaagtggaaactgacaaagccactgtggagatggagtgcatggaagagggctatcttgctaagattattcatggagatggtgcgaaggagattaaagttggtgaggtcattgctataactgtagaagaagagggtgacatcgagaagttgaaggattataagccgtcatcttcagctgaacctgtagctcctgctgaaccaaaggctgaaccagaaccctcacagccgaaggcggaggaaaaaaagcctacgcaggctcctgaggcgaagaccccgaagattgaagaagcttctcaatctggagatcgtatatttgccagccctcttgcccgtaaattggctgaagataacaatgtcccactatcaagtgtgaaaggtactggtcctgatggtcgtattttgaaggcagacattgaagattacttggcttctgtagccaagggtgggctgagggagtcttttgcagatccagggttaggttatgttgatattccaaatgcacagataagaaaggttactgcaaatcgcttgctagcatcgaaacagaccattcctcattactacttgacagtagatgcacgtgttgacaaacttgtccagttgcgaggtgaactgaacccactgcaggatgcttctggtggaaagaaaatatcaattaatgatcttgtcatcaaggctgcagctttggcccttcgaaaggtccctcagtgtaacagctcatggatgaatgattttattcggcaataccacaatgtgaacatcaacgtggctgtacagactgaacatggattgtttgttccagtaattagggatgcagacaagaagggactcggtgcaattgctgaggaggtgaagcagttggctcaaaaagcaagagataatagcctaaaaccagcagattacgagggcggcaccttcactgtatcaaatttgggaggtcccttcggaattaaacaattctgcgccatcataaatcctccccagtcagcaattttggccattggttctgctgagaagagggtgatacctggttccgctgatggccagtttgaatttggttcattcatgtcagctacactgagctgtgaccacagggttatagatggcgcaatcggtgcggaatttctgaaagcattcaagggatacatcgagaacccaacttcaatgctgctgtgaagttaggatggatgacctaacacaattttttgtcatgttaaataaccaggccaccaaagagtggcgtctccaaaccaagagcacagagccgtcttctccgttttgatattgccattgctaagtaggatcaacgtatacatgcattattggggtcatttttgggttttgtcctcacggataattgatggaaataaatatgaaagaagccaatcttggaaagtactctgattttgaggtcaaaaaaaaaaaaaaaaaaaaaa

SEQ ID NO: 4783 - DNA, 2397 bp, Oryza sativa Japonica Group
gctaccgatcttgttctctcgccccctcccggcgcgtgattcccggacgcgactcgactcgacatcccaattcccaatacaccaccacgacccccctccgtcctcatctgtcccgcggcctcgaccacgccgggaggagccgcagccagtccgggagacgctcgtacgcctgcctcgaccgatccagcgccgccacggcgaccgtggccaaggagatccgccccctcgtcggtccgccgccaacgatctccgatcgagacaaaccctagccacgcccattgccttctcccgtcgccatgtccgccgcgcatctcctccgccactctcgcaagttgcggagtttacacaatgctctagactgtgagcgttctggcctcgtgcgctacttctccactgcttctggttcgttccccaccaagggaaatggtgctgagaaaagaattggaggtgccagatttcctcagcgcaagcaacctggaaaagagcttgagacctccaagttgtcactaggacttaatggaagctacacttgcaggagatcacctaacaactttatcccaaatactattactggtctcaatggttcattgtcatgtggacagatagcttcagcaagatctttctcaagcagtgcagacctgccaccacatcaggaaatagggatgccatcactctctcctacaatgaccgaggggaacattgcaaggtggctgaagaaggaaggagataaggtctcacctggtgaagttctttgtgaggtggagactgataaagccaccgtagaaatggagtgcatggaagagggctatcttgctaagatcattcatggagatggttccaaagagatcaaagttggtgagattattgctgtaaccgtggaagaagagggtgacatcaagaagtttaaggattataaaccttcaactttggctgcacctgtagccccttctgaactgaaggctcagtctgagcctacagaaccaaaggtggaggaaagagagccttccaaagcatctgagctaaaggccccaaggactgaagaaccttcgcggtcaggagatcgaatattctccagccctcttgctagaaaattggcggaagataacaatgttccactgtcgagtgtaaagggaactggtcctgatgggcgcattttgaaggcagacattgaagattacttggctaagggttgcagaaaggaagctcttgcggctccagggctaagttacaccgatgttcccaatgcacaaataagaaaggttactgcgaaccgcctgctaagctctaagcaaacaattccacattattacctgacagttgacacacgtgttgataatctcatcaagttgcgaggggaactgaatccattgcaggagtcctccggtggtaagaagatatctattaatgatctagttataaaggctgcagctctggctcttcgaaaggtccctcagtgtaatagctcctggatgaatgattttatccgccaataccacaacgtgaacatcaatgttgctgtacagactgagcatggactgtttgttccagtaatcagggatgcagacaagaaaggacttggtatgattgcggaggaggtgaagcagttggctcaaagagcaagggataacagtttgaaaccagatgattatgagggaggcacattcaccatatcaaacttgggaggtccttttggaattaagcaattttgtgccatcataaatcctcctcagtcggcaatcttggccattggttctgctgagaggagggtgatacctggcagcgccaatggtcaatacgagtttggttccttcatgtcggcaacaatgagctgtgatcacagggttattgatggtgcaatcggggcagaatttctgaaagcattcaagggctatatcgagaatccaacctcaatgttactgtgaagctaaagatcatcaaaactattcttcccttgttctcgaatgatgcacagaacggtgctgtctcattttgtatatttccatcatgatttcgaggaggacctgaaaaccaagagcacagagccaagggcaggatgacctggtttttggattaatttttctttttcctgtttgtttcgttccagttacactgggaattaggatcaatttacaagccttcttttagcccgtttttatgggtttactccgcaagttcgttgacagcagagtaaattcccgggaaaccatgcaggatagcctttatacgatttgccccctttttactttttttttcatctttgtgcaaaaccaagaggcgcagaggtaataagttgcaaatcttggggagtttggtttataccctttctccgcaaaattctaacgagaaattcacaattgttcagagtaaatgatgcattgcttaatccattttgatgct

SEQ ID NO: 4784 - DNA, 2223 bp, Oryza sativa Japonica Group
aagacaagtcgcgacctgacgacccgaccttcctcttctctcccgctgccctccgccgccgacccgcaggggatcgtggggacgatcgatcgaggaggagagacccaaaccctagccacccaggcgccactcccattgcccccttcgccagccagccatgtctgcggcgcacctcctccgccactcccgcaagctgcggactctacgtgatgctctagattatgatcggtctgctcttgtacgctacttctccgctgcttctgcatcctttcccacaaagggaggtgctgctgctggtgttgagaaaagaattggtggcgccagattccctcagtgcaagcagcctgggaaagagcttgagaccttcaaggtgtcactaggaggactaaatggaagatatgcttgtagaagagcacctaacaattgtatcccaaccactattaccggtctcaacggttcattgtcatgtggacaggtgtcttcagcaagatctttctcaagcagtgcagacctgccaccacatcaggaaattgggatgccatcactctctcctacaatgactgaggggaacattgcaaggtggctgaagaaggaaggagataaggtctcacctggtgaagttctctgtgaggtggagacggataaagccactgtagagatggagtgcatggaagagggctatctcgctaagatcattcatggagatggtgccaaagagatcaaagttggtgagatcattgctgtaactgtggaagaagagggtgaccttgagaagtttaaggattataaaccttcaacttcagctgcacctgcagccccttctgaaccgaaggctcagcctgagcctgcagagccaaaggtgaaggagacagagccttccaggactcctgagccgaaagccccaaagactgaagaagcttctcaaccagggggtcgaatattctccagccctcttgcaagaaaattggcagaagataacaatgttccactgtcaagcgtaatgggaactggtcctgatgggcgaattttgaaggcggacattgaagattacttggcttctgtagcaaagggtggcaaaagggaagctcttgcggctccagggttaagttacactgatgttcctaatactcagataagaaaggttactgcaaaccgcctgctaagctctaaacaaactattcctcattattacttgacagttgacgcccgtgttgataatcttatcaagttgcgaggggaactgaatccgttgcaagagtcatctggcggtaagaagatatctattaacgatcttgttataaaggctgcagctctggctcttcgaaaggtccctcagtgtaatagctcgtggatgagtgattttatccgccaataccacaacgtgaacatcaatgttgctgtacagactgagcatgggttgtttgttccagtaattagggatgcagacaagaagggacttggtacaattgctgaggaggtgaagcaggtggctcaaagagcaagggataacagcttaaaacctgaagattatgagggaggcacattcaccatatcaaacctaggaggtcctttcggaatcaaacaattctgtgccatcataaatcctcctcagtcagcaatcttggccattggtactgctgagaagagggtgatacctggcagcgtagacggccagtatgagtttggttccttcatgtcggcaacaatgagctgtgatcacagggttattgatggtgctatcggcgcagaatttctgaaagcattcaagggctatatcgagaatccaaactcaatgttactgtgaagttaaagatcagcaaaactattcttctcatgtgctcgaataacgcagagtggtgctatctcattttgtataataccggcacggtgttctgtcaaggaggacccgaaaaccaagagcacataaccatagacagaatgacctggtttttggattaaaagctttttctgtttatcttttttttttttgtttgtttgtttcgttccagttatagtgggaattaggaggatcaacttacaagcatttttagcacctttttgtgggtttaccctcggcaagtgtgataactggagagagtaaattcccgggaaacaatgcagtatagcctgtatacgatttgtcccttttctttttccccttcatagtgcaaaaccaagaggcgcagaaggatctttcggaataaattggcaatcttggggagt

SEQ ID NO: 4785 - DNA, 1935 bp, Oryza sativa Japonica Group
agtagcacctccttccccaagaatcgcgcgcgcgcgcctgcctcgtcgccggcggccatggcgctcctcctccgccactctcccaagttgcgaagagcgcatgctatcctcggatgcgagcgtgggactgttgttcgtcacttctcatccagcacttgctcctctcttgtaaaggaagatactgtatcaagttccaaccttcatccagagtatgcaaaaaaaattggaggatcagatttttcccatgacaggcagtctggaaaagagcttcagaatttcaaggtctcaccgcaagaagcaagtagagcctccaatttcatgagagcatccaaatatggaatgccaattactgctaatggggtacatagtttgttctcatgtgggcaggtagtaccgtctaggtgtttttcaagtggagcagatttgcctccacatcaggaaatcggaatgccttcactctcccctaccatgactgagggaaacattgcaaggtgggtgaagaaagaaggagataaagtctcacctggtgaagttctttgtgaagtagagactgataaagcgacagtggagatggaatgcatggaggaaggctaccttgctaaaattatccatggagatggtgccaaagaaattaaagttggtgagattattgccgtaaccgtggaagaagaggaagacatcggcaaatttaaggattataaggctccatcatctgctgaatctgcagctccagccgaatcgaagccccaatctgagcccacagaaccaaaaaaggagaaagagcagcccaaggctcctgagccaaaggctacaaagacagaagaatcttttctttcagaggatcgcacattctccagtccaattgcaaggaaattggcagaagacaacaatgtaccactgtcaagcataaaaggtactggccccgatgggcgaattttgaaggcagatattgaggattacttggcttctgtggccaagggtgccaagaaggaaacagcagcagctcctggactaggctatgtggatcttcctaatacgcaaataaggaaggttactgcaaaccgcctgctgcactccaagcaaaccattcctcactactatctgacagttgatactcgtgttgacaaacttattaagttgcgaagtgagttgaatcctctgcaggatacctctggtggcaagaagatatccataaatgatcttgttatcaaggccgcagcattggctcttcgtaatgttcctgagtgtaatagctcttggatgaatgattttattcgccaataccacaatgtgaacatcaatgttgctgtacaaactgaggatggcttgtttgttcccgtaataagggatgctgacaagaagggcctagccactatcgctgatgaggtgaagcaactggctcagagagcaagggacaacagccttaagccagaggattatgagggtggcactttcactgtgtcaaacttgggaggcccttttggaattaagcaattctgtgccatcgtaaatcctccacaatcagcaattttggctattggctcagctgagaagagggtgatccctggagctgagggtcagtttgaagttggttcgtttatgtcagcaacattgagctgcgaccaccgggtcattgacggtgccattggtgcagaatggatgaaggcgttcaagggctacatcgagaatccaacgaccatgttgctgtaaatgaggatgacggggagagttattttttgtaggttttcacaaataaggctcacaataacggtgtcttcgttcttttcattgttttacactgtataacctcggcacggccccatgaggtcttgaaaccaaagagcaaacatacataggagtcagcacagcatcccttgtcatctctgtaaatgcatttttatcctgagctaaatcacaatttacagcgcgtagtgg

SEQ ID NO: 4786 - DNA, 1959 bp, Hordeum vulgare subsp. vulgare
ggttcttccccttggcgaatctctttcctccccgctccccacagattccgccgcaccgtcgccggcgccggcggccaccatggcgctcctcctccgccactcccgcaagctgcgaagggtgcacggtgtcctggactgggagcgcgggagcatcgctcgcaacttctccgccagtgcctgctccgccgctgcgaaaggagaagctgtctcaagttcgggtgttcatggggagtgcgggaaaaaggttggaagctcgagcattttccaagacaggcagtctggaaaagacctgcataccttcaaggtatcattacgagaggcaaggggaagctacagctccaaacagatgccaattgctgctactggggtcaatagcttgttctcatgtggacaggtagtttcggcaagacatttttcaagtggggcagatttgccaccgcatgaggcaatcgggatgccttctctttctcctactatgactgagggaaatattgcaaggtgggtgaagaaggaaggagacaaagtttcacctggtgaagttctttgcgaagtggaaaccgataaagctaccgtggagatggaatgcatggaggaaggctatcttgctaagattgtttgtggagatggcgcaaaagagattaaagttggcgagattatttgcataactgtggaagaggagggtgacattgagaaatttaaggattacaaggcttcgtcttctccttcagctgcagctccagctgaatcaaaaccccagtctgagcctgtgcaaccaaaagaagagaagaaagaggtttccaaggcccccgagccaacagctacaaagactgaagaatcttctcagtcaggggatcgcttattctccagtcctgttgccagaaagttggcggaagacaacaatgtaccgctttcaagcttaaaaggtactggtccagatgggcgtattttgaaggcagacattgaggattacttgtcttctgcatccaagggttcgaagaaggaagctgcagcagctccaggactaggctatgtggatcttccaaatacacaaatacggaaggttactgcaaaccgcttgctgcaatctaagcagaccatccctcactactatctgacagttgatagccgtgttgacaaacttatcaaattgcggagtgagttgaacccgatgcaggatgcatctggcgggaagaagatatctataaatgatcttgtcattaaggctgcagcgttggctcttcgtaaggttcctgcgtgtaacagttcctggatgaatgattttattcgccagtaccacaacgtgaacattaatgttgctgtacagactgagcatggtttgttcgttccagtagttagggacgcggacaagaaagggttggccactattgctgatgaggtgaagcagttggctctaagagcaagggataacagcctaaaaccagaagattacgagggtggcactttcaccgtctcgaatctgggaggccctttcggaatcaagcaattctgtgccatcgtaaaccctccccaatcggcaatcttggctattggctctgctgagaagagggtggtccctggagttgagggccaatttgaagtcgggtccttcatgtcagccacgctaagctgcgaccaccgggtcattgatggcgccatgggtgcggaatggctcaaggcattcaagagctaccttgagaacccgacgaccatgctgctgtaggagtttctttttttctgctgtaaatgatgatgatgagagcagtttttctgtgtaggctctcataaataaagaccacaataaccacgcctcatttttggcaatgagggcttgggaaccaagagcaaacaaacagatcatagtcggcacacgatgtttaacctatttatcggcaaatggccgatacaccttttccccctgcattacctgaccggtggaaatttgtcgcctacttttgcgct

SEQ ID NO: 4787 - DNA, 2068 bp, Zea mays; identical to SEQ ID NO: 1114

SEQ ID NO: 4788 - DNA, 2054 bp, Zea mays
cggccatggcgtcccgccgggtcgtctcctcgctcctccgctccgcgtcccgcctgcgggccgcctcgcccgctgctccacgaccgcgcgcgccaccgcaccgcccgtccccggccgggtacctcttcaaccgcgctgccgcctacgcctcttccgccgcggcccaggcggcacctgccaccccgccgccggccaccgggaagaccggggggggcaagatcaccgacgagttcaccggcgctggcgccatcggccaggtgtgccaggtgatcggcgccgtcgttgacgtgcgcttcgatgagggcctcccgcccatcctcacggcgctcgaggtgctcgacaacaacatccgcctcgtgctcgaggtggcgcagcaccttggcgagaacatggtgcgcaccatcgctatggacggcacggaggggctcgtccgcggccagcgcgtcctcaacactggctcccccatcaccgtgcctgttggcagggctacccttggacgcatcataaatgttattggtgaaccgattgatgagaagggtgacataaagacaaaccacttcctccctattcatcgtgaagcccctgcttttgttgagcaggccactgagcagcaaattcttgttactggaatcaaggtcgtggatcttcttgcaccctaccaaaggggtggaaagattggtctcttcggtggtgcaggagtgggtaaaactgtgctcattatggagttgatcaacaatgttgctaaggcccatggtggtttctctgtgtttgctggtgttggagaacgtacccgtgaaggtaatgatctgtacagggaaatgattgaaagtggtgtcattaagctagatgacaagcagagcgaaagcaagtgtgctcttgtttacgggcagatgaatgagcccccgggtgctcgtgctcgtgttgggttgactggtttgactgttgctgaacatttccgtgatgctgaaggacaagatgtgcttctgtttattgacaacattttccgttttactcaggcaaactctgaggtgtctgctcttcttggacgtatcccatctgctgtgggataccagccaacccttgccactgatcttggaggactgcaagagcgtattacgacaacaaagaagggttctattacatctgtgcaggccatctacgtgcctgccgatgacttgacggatcctgctcctgctactacctttgcccatcttgatgctacaactgtgttgtcacgacagatctctgagcttggtatttatcctgctgttgatccactggattccacatcaagaatgctttctccccacgtgctgggtgaggatcactacaacactgctcgtggtgtgcagaaggttcttcagaactacaaaaatcttcaggatattattgctatcttgggtatggatgagctcagtgaggatgacaagctgacagtcgcccgtgcaagaaagattcagcgtttcctgagccagcctttccatgtcgctgaagttttcacgggtgctccaggaaagtatgtggagctgaaggaaagcgtgaagagtttccagggtgttttggatgggaagtatgatgacctccctgagcagtcattctacatggttggtggcattgaggaagtcattgctaaggctgagaaaattgccaaggagtctgcttcataaggaggcttcttgcttgttcaaccctgtacaagttccatttttggattttaagcgtttatttatgcttttcccagttaggcatgacgagctggagagtccatctcctgctgagagatgtttgttttacccttctttgcttcctccaccttacacccaaataagcaactgcagtgccgttggttttggctgcacccaaactacatgactgaagaaacttgtggcctgtgtaacgcgaatccatcagaacgccaaagttatggcttctggttgtggcaaattatggttcctccctgttcggttgagtggttgcattctggaggtattgttctggactcaggctaatgattgtgcgtgcaactgtttcggagtcatttcaaagggttatcc

SEQ ID NO: 4789 - DNA, 2056 bp, Zea mays
actcctctctccgcccccctcgctagcctcgcggagccgccgcacccagcgaccctcccgaagtctaaccctagatccggaccggccatggcgtcccgccgggtcgtctcctcgctccttcgctccgcctcccgcctccgtgccgcctcgcccgccgcgccgcgcccgcgcggggcgccgcaccgcccgtccccggccgggtacctcttcaaccgcgccgccgcctacgcctccgccgccgcggcccaggcggcgcccgccaccccgccgccagccaccgggaagaccggcggcggcaagatcaccgacgagttcaccggcgccggcgccatcggccaggtgtgccaggtgatcggcgccgtcgtcgacgtgcgctacgatgagggcctcccgcccatcctcacggcgctcgaggtgctcgacaacgacatccgcctcgtgctcgaggtggcgcagcaccttggcgagaacatggtgcgcaccatcgctatggacggcacggaggggctcgtccgcggccagcgcgtcctcaacactggctcccccatcaccgtgcctgttggcagggctacccttggacgtatcattaatgttatcggtgagccgattgatgagaagggtgatataacgacaaaccacttcctccctatccatcgtgaagcccctgctttcgttgagcaggccactgagcagcaaattcttgttactggaatcaaggtcgtggatcttcttgcaccctaccaaagaggtggaaaaattggtctattcggtggtgcaggagtgggtaaaactgtgctcattatggagctaatcaacaatgttgctaaggcccatggtggtttctctgtgtttgctggtgttggagaacgtacccgtgaagggaatgacctgtacagagaaatgattgaaagtggtgtcattaagctaggtgacaagcagagtgaaagcaagtgtgctcttgtctacgggcagatgaatgagcccccgggtgctcgtgctcgtgttgggttgactggtttgactgttgctgaacatttccgtgatgctgaaggacaagatgtgcttctgtttattgacaacattttccgtttcacccaggcaaattctgaggtgtctgctcttcttggacgtatcccatctgctgtgggataccagccaacccttgccactgatcttggaggactgcaagagcgtattacgacaacaaagaagggttctattacgtctgtccaggctatatatgtgcctgctgatgacttgacagatcctgctcctgctactacctttgcccatcttgatgctacaactgtgttgtcacggcagatctctgagcttggtatttatcctgctgtcgatccactggattccacatcaagaatgctttctccccacgtgctgggtgaggatcattacaatactgctcgtggtgttcagaaggttcttcagaactacaaaaatcttcaggatattattgctatcttgggtatggatgagctcagtgaggatgacaagttgacggtcgctcgtgcaagaaagattcagcgtttcctgagccagcctttccatgtcgctgaagttttcacaggtgctccagggaagtatgtggagctgaaggaaagtgtgaagagtttccagggtgttttggatggcaagtatgatgacctccctgagcagtcattctacatggttggaggcattgaggaagtcattgctaaggccgagaaaatcgccaaggagtctgcttcataaggaggcttcttgcttgttgaatcctgtacaatcaagttccatttttggattttaagcgattgtttatgcttttcacagttaggcagcacgagttggagatccatctcctgctgagatgcttgtttttctctttgttgttcaaacacttcacacccaaataagcaactgcagtgacattaattttggctgcaccaaagttacatgaactgaagaaacttgtggcctgtgtgacccggatccatcagaacataaagttacggcttctggttggtaaattatgctactcttcaaaaaaaaaaaaaaaaaa

SEQ ID NO: 4790 - DNA, 1929 bp, Oryza sativa Japonica Group
gcgatctcccggccatggcgacgcgccgggccctctcctccctcgtccgcgccgcctccaggctccgcggggcctcgcccgccccgcgcccgcgcgggccgctccaccgaccgtcgccatcggggtacctcttcaaccgcgccgccgcgtacgccacggccgccgcggcgaaggagcggcctcccgcgcccgcgacggggaaggccacgggtggaggtaagatcaccgacgagttcaccggcgccggcgccattgggcaggtgtgccaggtcatcggcgccgtcgtcgacgtgcggtttgacgaggggctgcctcccatcctcacggcgctcgaggtgctcgaccacaacatccgcctcgtgctcgaggtggcgcagcaccttggcgagaacatggtgcgcaccatcgctatggacgggactgaggggcttgtccgcggtcagcgcgtcctcaacaccggctccccaatcactgttcctgttggcagggccacgcttggacgtatcatgaatgttattggtgagccaattgatgagaagggtgacataacaacgaaccacttccttcccatccatcgtgaggcgcctgcttttgttgagcaagccacagaacagcaaattcttgttactggaattaaggttgtggatctcgttgcgccctaccaaagaggtggaaagatcggtctttttggtggtgcaggagtcggcaaaactgtccttattatggagttgatcaacaatgttgctaaggcccatggtggtttctctgtgtttgctggtgttggtgaacgtacccgtgaaggtaatgatctttacagggaaatgattgaaagtggtgtcatcaagctaggtgacaaacagagtgaaagcaagtgtgctcttgtctacgggcaaatgaatgagcccccgggtgctcgtgctcgtgttgggttgaccggtttgactgttgcggttcatttccgtgatgccgaaggtcaagatgtgcttttgttcattgacaacatttttcgtttcactcaggcgaactctgaggtgtctgctcttcttggacgtattccatctgctgtgggatatcaaccaactcttgctactgatcttggaggacttcaagagcgaattacaactacaaagaagggttccattacatctgtccaagctatttatgtgcctgctgatgacttgacggatcctgctcctgctactacttttgcacatcttgatgctactactgtgttgtcacgacagatctctgagcttggtatttaccctgctgtcgatcctctggactccacatccagaatgctctccccccatgttttgggtgaggatcactacaacactgctcgtggtgtccaaagggttcttcagaactacaagaatcttcaggatattattgcaattttgggtatggacgagctcagtgaagatgacaggttgaccgtccgtcgcgcaaggaagatccagcgtttcttgagccagcccttccatgtggctgaagttttcacgggtgctcctgggaagtacgtggagctgaaggagagcgtcaacagtttccagggtgttttggatgggaaatatgatgaccttcccgagcagtcattctatatggtgggaggcattgaggaagtcattgctaaagctgagaagatcgccaaggagtcggcttcatagatctcttcattgttgttaagttctgtacaagttaaattttggattctggctttctatatgcccgttctgtagccaggacgtgattacaagcaggggtgacatcttcagatgagcgatgtttttttgtcttccttttctccttttacccctaataaggaaccgcagtgacattgtattgtgctgcacaaaagtactcggaacttcgaaagcatgtgtcctttataatgcagatccatgaagcataggatcaaaaaaaaaa

SEQ ID NO: 4791 - DNA, 2006 bp, Hordeum vulgare subsp. vulgare
ggcggaccatttcgataacctagatccaagccctcgttgccggccatggctacccgccgggccatctcgtcagtcctccgcgccgcctcccgcatccgcgccgcctccccgtccccgtgcccccgcgcgccgctccaccgcccgtccccggccggcttcctgctcaaccgcgccgccgcctacgcgtcatccgccgcggcggaggctgctcccgtcacgccgccccccacctccgataagcacaccggcagtaagattacggatgaattcaccggcgccggctcggtgggtcaggtgtgccaggtcatcggtgccgtggtggacgtgcggttcgacgatggtctccccccgatcctgaccgcgctggaggtgctcgacaacagtatccgcctcgtgctcgaagtggcacagcatctcggggagaatgtggtccgcaccatcgccatggacgggacggaagggctcgtccgcggccagaaagtgctcaacaccggctcccccatcactgttcctgttggtagagcgactcttgggcgtattatcaatgttattggtgagccaatcgatcacaagggagatataaaaacaaacagttacctgcctatccatcgtgaagcccctgcttttgttgagcaagctaccgagcagcaaatccttgttactggaattaaggttgtggatctactcgcaccctatcaaagaggtggtaaaattggtctcttcggtggtgcaggggtgggcaaaactgtccttattatggagttgatcaacaacgttgccaaggcccatggtggtttctctgtctttgctggtgttggagaacgtactcgtgagggtaatgacttgtacagggaaatgattgagagtggtgtcattaagctcgacgacaagcagagtgagagcaagtgtgctcttgtgtacgggcaaatgaatgagccccctggtgctcgtgctcgtgttggactgactggtttgactgtcgctgagcatttccgtgatgccgaaggacaggatgtgcttctcttcattgataacattttccgtttcactcaggcaaactctgaggtgtctgctctgcttggtcgtattccatctgctgtgggataccaaccaacccttgctactgacctgggagggctgcaagagcggattaccaccacgaaaaagggttctattacatccgtgcaagctatttatgtgcctgctgatgatttgacagatcctgctcctgctactacttttgcccatcttgatgctactactgtgctgtcacgacagatttctgagctcggtatttatcctgctgtcgatcctttggactccacatccagaatgttgtctccccatgttcttggccaggagcactacaacactgctcgtggtgttcagaaggttcttcagaattacaagaatcttcaagatattattgccattttgggaatggatgagctcagtgaggatgacaagttaacagtggctcgcgctaggaaaattcagcggttccttagccaacctttccatgttgctgaagttttcacaggcgcaccgggaaagtatgttgagcttaaggagggtgttcaaagtttccagggtgtgctggatgggaaatacgacgacctttcagagcaggcattctacatggttggaggaatagaggaggtcattgccaaggcagagaagattgccaaggagaatgcttgataagaaactccctccttacaagcaacgtgcaattttaacctttttgtggtcaacctgttgtggttttactgtttgttagccaggatatgtacgtagaggcaggaggcccggccctgctgatggatgtttcccccctccactttttcccgaataaggatttgcagtgacctatttatttggcttactgccctttaaggaagagagttctctttttgtgtgacacatgagcggccagaccgtgagcttgttacctctcgggaacttgttacctgtcggtggaaaaaacaaactgaatatttgtctcc

SEQ ID NO: 4792 - DNA, 2049 bp, Oryza sativa Japonica Group
attccccgcagcgcggagccgccgccactcccccccaccctcaccccgcagaccattcggaaaacctagatccgagccttcccccttcccctcccccggcggcggcggccatggcgacccgccgggccctcacctccgtcctccgctccgcctcccgcctccgcgccgcctccccttccccgtgcccgcgccgcgcgccgctccacccccaccgccgcccgtcccccgcgggcttcctcctgaaccgcgccgccgccgcctacgcgtcgtccgccgcggcgcaggcggcccccgcgcctccccccgcgtcgggcaaggccaccgggggcggcaagatcaccgatgagttcacgggcgctggcgccgtcgggcaggtgtgccaggtgattggcgccgtcgtggacgtgcggttcgacgagggcctgcccccgatcctgaccgcgctggaggtgctcgaccacaacatccgcctcgtgctcgaggtggcgcagcatctcggggagaacatggtgcgcaccatcgccatggacgggaccgaggggctcgttcgcggccagcgcgtgctcaacaccggctctcccatcactgttcctgttggtagggccacacttgggcgtattatgaatgtcatcggtgagcctattgatgagaagggagatatcacaacaaaccacttcctccctatccatcgtgaagcccctgcttttgttgagcaagctacagagcaacagattcttgttactggaattaaggtcgtggatctccttgcaccctatcaaagaggtggtaaaattggtctcttcggtggtgctggggtgggcaaaactgtacttattatggagttgatcaacaatgttgcgaaggctcatggtggtttctctgtctttgctggtgttggagaacgtactcgtgagggtaatgacttgtacagggaaatgattgagagtggtgtgattaagcttggtgacaagcagagtgagagcaagtgtgctcttgtctacgggcaaatgaatgagcccccgggtgctcgtgctcgtgttggactgactggtttgactgttgccgagcatttccgtgatgctgaagggcaggatgtgcttctcttcattgataacattttccgtttcactcaggcaaactccgaggtgtctgccctgcttggacgtatcccatctgctgtgggataccagccaacccttgctactgatcttggaggactgcaggagcggattaccaccacaaagaagggttctatcacatctgttcaagctatttatgtgcctgctgatgacttgacagatcctgcccctgctactacatttgcccatcttgatgctactactgtgttgtcacgacagatttctgagcttggtatttatcctgctgtcgatcctttggattccacatccagaatgttgtctccccatgtactgggtgaggaccactacaacacagctcgtggtgttcagaaggttcttcagaattacaagaatcttcaagatattattgccattctgggaatggacgagctcagtgaggatgataagttgacagtcgctcgtgctaggaagattcagcggttccttagccagcccttccacgttgccgaagttttcacgggtgcacctggaaagtatgttgagctgaaggagagcgttcaaagtttccagggtgtattggacgggaagtatgatgaccttcctgagcagtcattctacatggttggaggaatcgatgaggtcattgccaaggcagagaagattgccaaggagtccgcttcataagcgatgcaatttttaacatttggaggtcaacatgttgtgccttttatgtttgttagccaggacatgtacttacatgcaggaggcccggccctgctgatcgatgtttttcccctccacttttttccaaataaggatttgcagtgacctatttgtttggcttactgcccttcaaggaagaattgagttctctttttgtgtgatgtgcggccagtccggcagtccgtgaacttgttacttgctgaaaacactgaaatattggtctccc

SEQ ID NO: 4793 - DNA, 1983 bp, Nicotiana sylvestris
ccatggcgacgcggcggcttctagcctctctcctccgatcaaccgcccaacgcggcggcgctatttccagatctccattagcaaattccattcccagaactacttcacgggcctcaccgaaaggattcctcttaaaccgtgccgttaagtacgctacctcagctgctgctgagaagccgaaggcgactcctcctaaaccttccggtaatgaacctactgggaaaatcaccgatgaattcaccggcgctggttcgatcgggaaagtgtgtcaggttattggtgccgtcgtagatgtgagattcgatgaaggtttgcctccgatccttacggcgcttgaggttttggataaccagatccggcttgtgcttgaggttgctcagcatttgggtgagaatatggttaggactattgctatggatggtactgaaggtcttgttcgtggtcaacgtgtcctcaatactggctctcctatcactgtccctgttggtagagccacccttggtcgtattattaatgtcattggagagcctattgatgagagaggcgacattaacaccgatcactttttgccaattcatcgtgaagctcctgcctttgttgagcaggcaactgaacaacaaattctcgttactggtatcaaggttgttgatcttcttgccccttaccaaaggggaggaaagattgggctttttggtggtgctggtgttgggaagactgtgcttattatggaactgattaacaacgttgcaaaagcgcacggaggtttctctgtctttcctggtgttggtgaacccagtgctgagggcaatgatttgtacagggaaatgattgaaagtggtgttattaagcttggtgacaagcaaagtgaaagcaagtgcgctcttgtgtacggtcaaatgaatgagccccctggtgctcgtgcccgtgttggtcttacaggcttgactgtggctgagcacttcagagatgctgaggggcaggatgtgcttctcttcattgacaacattttcagatttacccaggctaactcagaggtgtctgctttgcttggtcgtatcccatccgctgtcggttatcaaccaactttggctacagatcttggaggtcttcaagagcgtatcactacaaccaagaaaggttctattacatcagtccaagctatttatgtgcctgctgatgacttgacagatccagcccctgctacaacctttgctcacttggatgccacaactgtcttgtcccgtcaaatttctgagctaggtatttaccctgctgtcgatcctcttgattctacatctcgtatgctctcacctcacattttgggagaagaccactacaatactgctcgtggggtacagaaagttcttcagaactacaagaatcttcaagatattattgccattttgggtatggatgagcttagtgaagatgataagatgactgttgcccgtgcacgtaaaatccaaagattccttagtcagcctttccatgttgctgaagttttcacgggtgcccctggaaagtatgttgacttgaaggagagcattaacagtttccagggagtcttggatggaaaatacgatgatctttcagaacagtccttctatatggttggtggaatcgatgaggtcattgccaaggcagaaaaaattgccaaggaatctgcagcttagattatggactccagtgactttctttcattatctttcatcgataactacagagataatttaagtttctgtgacactttggattctttttgagagccaagggtccaagattttctggtttttgtttttatatgcaatccggaattgtgatagggaagacatggagctaaggcctacttgccaaacacccacccttgacgctctgttatgtcgcaaaataaagggggtaaaacggcgaacttgtatattttactttgaattaatcttgagaatgttggttgcccagtttatgaaaaaaaaaaaaaaaaaaaaa

SEQ ID NO: 4794 - DNA, 4384 bp, Nicotiana sylvestris
actaaagggaacaaaaactggtaccaacacgtggtgcttcagcattgtttgaactcgtcggacgcagaatataccgttctctttcttcaaacagaaacacaagttacacaactctctttcttttattcattcacttcccttcatttcattcatatgcaaatgtaaaatcagttatatcgtgagggtgtcgctctgattacgctacgtcacttgttacacattcacaaaaccatggcttctcgaaggttcctttcctccatgctccgctcatccatacgtcactcttcctcaaaaccctcactcacaacccatatccaccgcccctctccggccggccaccttctccaccgcgccgtcaactacgccacctctgccgccgcaaaggcgacgcctgcacctcagaaaaaaactcctcctccgaagattaaggaaacaggcggtaagatcaccgatgagtacaccggcgctggtgccattgggagcgtatgtcaggtgatcggagctgttgtggatgtccggttcgatgaaggtctgccgccaattttgacggcgttagaagtgatggataatgatataaggttggtgctagaggtagctcaacatttgggagaaaatatggttaggactattgctatggatgggactgaagggcttgtgcgtggtcaaagagtcctcaatactggctcccctattactgtaattttcttatatcgcttttaagctctatatatatatgtgcagctttgtcaaaacttgacattgtagtttatttacatatgctacattacgttacacggatccttaatcttccgtgaagacccgcgtcacatagttgtatttgggtatggatttctgcggatttttcaaaatacactaaaaattggtaaaattttacacttgctcatacagtcataccatatatttttacgtgcacccgtaaaagaaccattcataacttaagttacagtatattgtctctcaattgacaattaaaatgctgtcttttgtatgttttatcggtctgaatttcttcttaaaaatgtgtgtaggacactgcgcatttgtttaatttccgaatttgtataggatcttttacccctgaataggatgtttgcaagtttatattagcacgttcatactccttctaatcttggttttgaaatgtcaggtgcctgttggcagggctacacttggtcgaattataaatgtcattggagaggccattgatgaaaggggtgatataagtaagaatctgcccattagctaaaatcatttttttctcttagtggcactacatacgtaatgttgctttttcctatttcaatttttgatcttgattgggacgatctctttttttattgtcttttcttttttcatatttgctttattgagatgttgtggatctacagaaacggatcattatctcccgattcaccgtgaagctccatcttttgttgaacaagcaactgagcaacagatccttgtgactggaattaaggtacgagatattacttttctgcatattaggaactgaacacatctcagagtgatagattcaaggcatctgtcctcatttctatgcttttggtggaagctaaacaggagtagcaaatatttgattagcacatgcaatttatgaagtaattatatattttcatgtgtatttgcttttggaagacgatatacaaatcattttaaccctcactaaagtcaacaaatgctgaatcacgttgttgtctattatctctgggtatgatttaacttgcttttgatgacaggtggtggatctacttgctccttatcaaaaaggtggaaagattggactttttggtggtgcaggtgttggaaagacggtgcttattatggagcttattaacaacgttgccaaggcccatggtttgttactagttgcactaggaatgagagagagtcttcatgtattcttgttctttaagtgaatttaatttcatattcacttcctcgtcctcaggtggtttctcagtgtttgctggtgtcggtgaacgtactccggagggtaatgatttgtacagacaaatgattgagagtggtgttattaaccttggtgataaccaggtctctgtagataacatttgcttttcaaaacatagtgcacgcatctcttgcaattggctgattttgcacgtatatttatccgtagggtgaaagcaaatgtgctttggtatatggtcaaatgaatgaacctcctggtgctcgtgctcgtgttgggctcactgggctgacagttgctgaacacttccgagatgctgaagggcaagatgtgctccttttcatcgataatatttttcgcttcactcaagtgagctatcttttcaaataccttagtttgagtatattttacttgccttaaacttttgtaaaatgatttctactctttccctccgtctctgggattgctctaggccaactctgaggtgtctgctttgcttggtcgtattccctctgctgtcggttaccagccaactttacctacacatcttggggggcttcaacagaggattactacaactaagaaggggtccatcacctcagtccaagctatctatgtgcctgctgatgacttgactgatcctgcccctgctaccacctttgctcaccttgatgctacaaccgtgttatctcggcaggttagtttcttatatttgcaattatgtttcagaaaaacacttttcatgctattttattaacatcgtcgctcttctccaatgcagatttctgagcttggtatttatcctgcagtggatcccttagattctacgtcccgtatgctttctcctcatatcctaggtgaagatcattataatactgcgcgaggtgtacaaaaggttctccagaactacaagaatctccaggatattatcgccattctgggaatggatgaactgagtgaagatgacaaactaactgttgctcgtgctcgtaaaattcagaggttcttgagccagcctttccatgttgcagaagtatttactggtgcccctggaaagtatgtggatttgaaagagagcatccaaagttttcaggtaactgagagcaactttcttactgagtttgtgcgaacaaacacatgtacttcatctttctgctaaactttaacaatcacctgctgttggtttctttgaccagaaattttcattctgtatataattttaaccttcattttcattctgagcagggtgtcctggacgggaaatatgatgacctatcagagcaatcgttttacatggttgggggtatagaagaagtcattgctaaggctgagaagattgcgaaggagtcagctagttgattatttaactgcagtttcttgtttctcttttttgttttgttttttcaaaattaggatagctcattaaatggcagagagactggagatttttaaacggctttatttttcttatgagttagtctagactaagcattagtattcttctgtttcctcgtagttttccacctaaattgattgatgtgagattgtgagttacaggatatcagaaggtcattgcctgttttccatggcttcctgctgaatatgtaccattcttttggggacgaaatgaggatttctcattcctcctttatccaactgtttaggttttgtccaaaatctgcaagaaatttacttaatcatcatttgattaacggatctttggttctgctttggtagaaatcaaggcaatatcacagtatcgtggtttcgatcattcgatctccttttatcacagtttctccacacattatgtacaaagctcagtcatgagcattctctggtggcagtgtttttttctttttcctgtttttaatttccagaagagttggaattgccatataaaattttcagttctgcaggggattatctcccttggtttatgcaaacaagtgcacaatcacaaagttctgcaaaatgcctcctttatcgcgcaactgtttggaaggcacatggtaagttttatgaatcaacctaggttcctggtttggatgtatcggttttgcgcttgagaaacacaaagtagctggcctctgttcgatatttatcatcgtacaaaaccggatgcgaaccaactttttcagcataacgttgaaacaattcctcaatgacgtctttcccaaagtgttcctcaaatagtccctctgttaccgctcgtatagataagactacagtctggatatcgtgtactacttgtctgaagggagttggtagcttctcaaaccttggcgatgtcaaagccatccatgtgcctttatcagtgtttccagttccatatgtgatgttgtaatagtatgggaagttttgaaacgaatccaacttttcccctgatatgaatgcccctgaaaaacggaaaga

SEQ ID NO: 4795 - DNA, 3644 bp, Nicotiana sylvestris
cgcccaacgcggcggcgctatttccagatctccattagcaaattccattcccagaactacttcacgggcctcaccgaaaggattcctcttaaaccgagccgttaagtacgctacctcagctgctgctgagaagccgaaggcgactcctcctaaaccttccggtaatgaacctactgggaaaatcacagatgaattcaccggcgctggttcgatcgggaaagtgtgtcaggttattggtgccgtactagatgtgagattcgatgaaggtttgcctccgatccttacggcgcttgaggttttggataaccagatccggcttgtgcttgaggttgctcagcatttgggtgagaatatggttaggactattgctatggatggtactgaaggtcttgttcgtggtcaacgtgtcctcaatactggctctcctatcactgtgagtgcgctgatctttgctttactggtttagaacatacatttcttaaggaattcggcaatgtgatagtgatctatttttgtatggtggctggggaccgattttatttaattattctacatgatgtatgggtttaattcatgatttatgtgaaattgattgaaatattttattgatctagatttctggtttggggggctaatcctaggaggattattttcatactgataggagtttgtttgaagtttttttgataaagtaacaacattttattgaaagtttgggaagaatataccaaaaagtaaaaacctaggagttttttgaagctgcaaatgtgtaactagagcggagtgtatggtttataggtttgcttatgatatagtaatgggcatttctttgctcccaaatatagtgcctgtgtctggttatcctagtatggattcagatgtgtgtaaatatgtttgtttttctcgtaagagctgtattttttattgaatggagtatgttgaaattctgaatgggcacctactggtttgtggagttactcatgtctattcacaacaagaagagatacagttcttcgcttcaactgatgaacggatttgccactgtattacacatcctttcgtttctgaaagatcattttcccttgtaaaatgttgtgaaaattttcccatttcacttattttctcttacttgaatgagaaagagactcctgctgtgcaactcttttgttcttctaacatgtctgttcttcaaaattgtttttgtttctcctccttctcccctcttcttcttcccccggggagaatgtagtcttttcttatttgtcgtttcttttaacgcgggagttcagttctaaaattttgtggtctttcttctgttttctcctaaaagaaaaattattgagtaatggaatgaaacattgttccaatggagcagaattgatactgagaacttatagcctaccgcaactagtttggagagtttggagttgaggcatagtaattgttgtttcatctcagttgatatcctgctttcagtgggagtgcagataaatagattggtctggcattcacttgctgcatattttgtgcagaaattgatggtttccattgtgattccaggtccctgttggtagagccacccttggtcgtattattaatgtcattggagagcctattgatgagagaggcgacattagtaagttttaaatgccgtttatcccttctctaaattgtccacgtgaatggttctaaacattgcatttctctctctaaaaattgctgcagacaccgatcactttttgccaattcatcgtgaagctcctgcctttgttgagcaggcaactgaacaacaaattctcgttactggtatcaaggtatgctaatcaaaataattttagtcagtgctctcgtttccatcaccttttctgaccatataatggtttcctgaagtgtaactcttatttgacatttatgacatacgatgtcaatttcattatcgctgattcgccgaccaggttgttgatcttcttgccccttaccaaaggggaggaaagattgggctttttggtggtgctggtgttgggaagactgtgcttattatggaactgattaacaacgttgcaaaagcgcacggttagtgctgcttccgagttttcttcttgttagctcaaatataagttagtgtggaagcttatctgtcagaggattggcttttttcttcaggtttctctgtctttcctggtgttggtgaacccagtgctgagggcaatgatttgtacagggaaatgattgaaagtggtgttattaagcttggtgacaagcaagtacgcgtcctatttaatcagaagttatttgctatacccctttagcctacagtgttattccagactgttgttgacattttgtcttattggttttatcagagtgaaagcaagtgcgctcttgtgtacggtcaaatgaatgagccccctggtgctcgtgcccgtgttggtcttacaggcttgactgtggctgagcacttcagagatgctgaggggcaggatgtgcttctcttcattgacaacattttcagatttacccaggttggttggcctatgaggctgaatgatggctgaagtttccttaaatatgcaaattttcaacccttgctaaacctgttgcttctggcattgaaacaggctaactcagaggtgtctgctttgcttggtcgtatcccatccgctgtcggttatcaaccaactttggctacagatcttggaggtcttcaagagcgtatcactacaaccaagaaaggttctattacatcagtccaagctatttatgtgcctgctgatgacttgacagatcctgcccctgcaactacctttgctcatttggatgccacaactgtcttgtcccgtcaagtatataatgccataacgtcacttgctctgtaactttatatttcaccccttgtagagtttgccttaaattttctaacttcatatatttgaattccagatttctgagctaggtatttaccctgctgtcgatcctcttgattctacatctcgtatgctctcacctcacattttgggagaagaccactacaatactgctcgtggggtacagaaagttcttcagaactacaagaatcttcaagatattattgccattttgggtatggatgagcttagtgaagatgataagatgactgttgcccgtgcacgtaaaatccaaagattccttagtcagcctttccatgttgctgaagttttcacgggtgcccctggaaagtatgttgacttgaaggagagcattaacagtttccaggtaatgaatctcaaatttggaatcttgtcgtccgttattatggttggttaaaactcataaaaagaaatcacttggatcttaaaacacttgggttagtctactttgaatcaatcttcttctaccatacccttttgttactgttacatctccctgattgccttgtctacctcttccagtatgttgatatgttgaagctatttcctattatattcctaaattattttaattttttggtggattttatccagatgataaatcttgctatgtgcatattcgatctgattctaacttgctggcatctgatactgattattctgtgattgattttccagggagtcttggatggaaaatacgatgatctttcagaacagtccttctatatggttggtgga

SEQ ID NO: 4796 - DNA, 2641 bp, Zea mays; identical to SEQ ID NO: 1115

SEQ ID NO: 4797 - DNA, 1968 bp, Zea mays
cacgggctaagaattatgagctgcaggaaccagcgacctgccatttgctttccctaagtacactttcccctcggcgctcgcgctccaccgccggccatcctcagcggaacaggaaaaccgtgctgtttccccgcgctgcttccggtcgatggaattcgctcgccgaggccgcggcgacgaggacatcgacgacatgcaccggttcatcgaccttccgccgcctcacgtggacccattgctggtgattagggaagcgctgctgtcacagcttcagaaggatcgtcttcgccaggagatcatccaggttgagttggctaagatagagcgtgccatggtcctgtgcaagtgcaacagctcacatcatggtattgccgctgatgatgtggaatggactaggcctgctcccttcaccttcagggagcagtccatgcgaccttggcgatggtcagtcagtcaagaatgttatgtcgatgtggatgaggtccatgatcgaaagcaaaaggagggaaggcacaggagtgtagtgttgaagtctgagaagcctgccatggaagatggtgaatgcttgagaccttgttgtaatggtaaggcaagtcaggagaattcaaaagtcgaagatcagaaatcacaagaatccagtgagaccatacagcccaagacgactttgccttcagtgaaatgggaactgacaggaataacaataccagttaagaaaaagaaacgacaccagaaactgagttgtgaaatctgccaggtgcaagcaactagtgagcacagcttacaagaacaccgtgcagggcgtaagcaccaattaaaagaagcaattgatcagaaggtacaattaacagaagaatcctcttccagcacagagcagaaaacatcctcgataaaatggagctgcagtacatgccaggccaacggtacaagcgaatcagacctgaaggagcatctaaatggaagaacacaccgacaaaacattaaagcgcaactcatggagagtgatggcattgctaagactaatgagctgcaggaaccagagtgccctaagaacaatgcaccacaacattcagagaagccacctccgatgagttctacccattgcctagcgaactctactcatgaattggagttacgagggcaccttttagctaagcctcaagctctactggacgaaatcagtaacctgtcaaggaattctgagtcgcgagaagccacggtgcttccgaacattgcaccgcaacatacagagcagactccaggatcaaattgtagcatacttcaagctgattctgattgcaaattagacttggagcaccaatttggagcgaagatacaccaactgaatgtccaggacctacttgaagaagccaagaaaacaggagattttccaccagaaattgccaaggaccagcaaccgccctctgaatggggttgtgttatctgtcaggcaaaatgttactccgcacctcaattcgctcagcactgcagaggcaagaaacaccaaaagaaggtggaggcactacaaggaggcgtggatgccaaatcaagtaatctgacgacagtgcacaaagcagcttcaaatggtcctgactgcagcagttcgagttcagagaaggtggaggatcagacagcattgtggtcgtgcggggtttgcaatgtgcagtgcaacagcgagagtatgcttgcaggccattgtaaggaggaggaacatatggagaaacagaagttgcgggatttctgcgaggtctgcaatttgaagtgcaacagcgaaaagatgcttgctcaccatctttctgggagtaagcaccagaaaaggctcagtgcgaacaagcgaaatgcagttgtggcttgggtcccggtggcactgaggggaattgtacagtaagataaggaacctagtaccccacctagtgaagtttgtataccatgccactatttattatagtgacccgactgcaatttcaaaat

SEQ ID NO: 4798 - DNA, 1987 bp, Sorghum bicolor
ccacgggcagcccaccatttgctttcctccaaagctttccttcccctcagcgctcccccgccccgccgtcctcgccggaaaagtaaaaccgtaccgacgtgccgtttccacgcgccgcttcctgtcgatggaattcgctcgccgaggccgcggcgacgacgacgtagacgacggccaccgcttcatgcaccttccgccgcctcacgtggacccaatgctggtgattagagaggcactgctgtcacagcttcagaaggatcgtcttcgccaggagatcatacaggcagagttggctaagatagagcatgccatggttctgcgcaacggttcacgtcatggtattgccgctgatgatgtggaatggactaagccagttcccttcaccttcagggagcagtccatgccaccttggcgatggtcagtcagtcaagaatgttatgccgatgtcgatgagatccatgatccaaagcaaatggagggaagggacagaaatgtagcattgaagtctgagaagcctgccatggaagagcatatcgtcgaatgcttgagaccttgttgttgtaatggtaaggcaggtcaggagaattcaaaacttgaagagcagaaatcacaagaatccagtgagaccgtacagcccaagatgacttctccttcagtgaaatgggaactgacaggaataacaataccagttaagaaacgacaccagaaattgggttgtgaaatctgccatgtgcaagtaactagtgagcacagcttacaagtacattgtgcaggacggaagcaccgatcaaaagaagcaagttatcggaaggcacaattaacagaagaatcctcttccaggacagggcagaaaacatcctcaataaaatggagctgcagtacatgccaggtcaatggtacaagcgaatcagacctgaaggagcatctgaatggaagaacacatcaacaaaacattgaagcgcaactcatggagggtgatggcatggctaagaataatgagctgcaggaaccagagtgccacaagagcaatgtaccacagcacttagagaagccaccttcaatgtcgagttctgccatttgcctagcaaatgctgctcatgaattggagttaggagggcaccttttagctaagcttcaagctctactggacgaaatccgtaacatgtcaaagaattctgaatcacgagaagagacagtgcttccgaacattgcaccgcaaaatgcagagcagacttcggggtcaaattgtagcatatttcaagctgattctgattgccaattagacttggagcaccaaattggaagcaagatacaccaactgaatgtccaggacctacatgaagaagccaaggaaacaggagattttccaccagaaattgccaagaaccagcaaccaccctttgaatgggattgtgttatctgtcaggcaaaatgttactctgcatctcaatttgctcatcactgcagaggcaagaaacaccaaaagaagatggatgctctacaaggagaaggtgtgaatgggaaatcaagcaatctgacgacggagaacagattagcttcaaatggttctgatagctatagttcaagttcagagaaggtggaggaacagacagcattgtggtcgtgcgggatttgcaatttgcagtgcagcagcgagagtatgcttgcaggccattgtgaggaggacgaacacttggagaaacagaagttgctggatttttgcgcggtctgcaatttgcagtgcaacagccaaaagatgcttgctcaccatctttctgggaataagcaccggaaaaggctcaatgcgaataaacgaaatgcagttgtggctcttgtctaccaaaatagcaatggtgaaattgtacagtaaaacacggaccgtacttatgaagtttatatgctatgccactgttaacaattcattttgttgaccgactgtaattgtcatccgttggctaattcaaaatacatagtactatatactagc

SEQ ID NO: 4799 - DNA, 2129 bp, Sorghum bicolor
aaacccctaccacccttccccgcagagtggagccgccactgccacccgcaccattctgaggaaaacctagatccggacccctcgccgccggccatggccacgcgccgggccctctcatctatcctccgctccgcctctcgcctccgctccgcctcaccgtccccgtgcccgcgcgcgccgctccaccaccgcccgtcccccgcgggcttcatactcaaccgcgcagccgcctacgcatcctccgccgcggcccaggccgcgcccgctccgccgcctccttccaccggcaagaaaaccggtggcggcaagatcaccgatgagttcaccggcgccggtgccatcggccaggtgtgccaggtcatcggcgctgtcgtggacgtgcgcttcgacgaggggctgcccccgatcctgacggcgctcgaggtgctcgacaacaacattcgcctcgtgctcgaggtggcgcaacatctcggtgagaacatggtccgtaccatcgccatggacgggacagaggggctcgtccgcggccagcgtgttctcaacaccggctctcccatcactgtccctgttggtagggcaacgcttggacgcattatcaatgttatcggtgagcctattgatgagaggggagatataacaacaaatcacttccttcctatccatcgtgaagccccagcctttgtcgagcaagctacagagcagcaaattcttgttactggaatcaaggtcgtggatcttcttgcaccttaccaaagaggtggtaaaattggtctctttggtggtgcaggggtggggaaaactgtccttatcatggagctgattaacaatgttgccaaggcccatggtggtttctctgtctttgctggtgttggagaacgtactcgcgagggtaatgacttgtacagagaaatgattgagagtggtgtcattaagcttggtgataagcagagtgagagcaagtgcgctcttgtctacggtcaaatgaatgagcctcctggtgctcgtgctcgagttgggctgactggtttgactgttgctgagcatttccgtgatgctgaaggacaggatgtgcttctcttcatcgataacattttccgtttcacccaggcgaactctgaggtgtctgctctgcttgggcgtattccatctgctgtgggataccaacccacccttgctactgatcttggaggactgcaggagcggattaccaccacaaagaagggttctattacatctgttcaagctatttatgtgcctgctgatgacttgacagatcctgctcctgcaaccacctttgcccatcttgatgctactactgtgttgtcacgtcagatttctgagcttggtatttaccctgccgtcgatcctctcgactccacatccagaatgttgtccccccatgttctgggtgaggatcactacaacactgctcgtggtgttcagaaggttcttcagaattacaagaatctccaagatattattgccattctgggaatggatgagctcagtgaagatgacaagttgacggtcgctcgtgctaggaagattcagcggttccttagccagccattccatgttgctgaagttttcacgggtgcacctggttatgtgttgtttagcggtgttttggatggcaagtatgatgaccttccagaacagtcattctacatggttggaggaatagaggaggtcatcgccaaggcagagaagattgccaaggaaaatgcatcataaacagtctccacaggcaatgcaaatttaactttggaggtcaacatgttgtgccttttattctgcgttatcaagaacatgtatttacgtgagcaggaggccctgccctgccaatggatgtgttttccctccgtttccccccataataaggattcactatgacattttcatttggcttactgccctttgaggaagaattatcctttttgatgacggcgaaactatgaacttgttaattctcaaagaaatactgtagtctcacatgttcatagctgttttgaggttacctgttcaatttttttctgaaccgattccacagtttgttaactgtgcagtctattttttgtgatctgtttccaactccagtgtttggttcatgggacgataagggatgagat

SEQ ID NO: 4800 - DNA, 1973 bp, Oryza sativa Japonica Group
aaaagtctaaccctagatccaggccccgcgtctccggcgatctcccggccatggcgactcgccgggccctctcctccctcgtccgcgccgcctccaggctccgcggggcctcgcccgccccgcgcccgcgcgggccgctccaccgaccgtcgccatcggggtacctcttcaaccgcgccgccgcgtacgccacggccgccgcggcgaaggaggcggcgcctcccgcgcccgcgacggggaaggccacgggtggaggtaagatcaccgacgagttcaccggcgccggcgccgtcgggcaggtgtgccaggtcatcggcgccgtcgtcgacgtgcggtttgacgaggggctgcctcccatcctcacggcgctcgaggtgctcgaccacaacatccgcctcgtgctcgaggtggcgcagcaccttggcgagaacatggtgcgcaccatcgctatggacgggactgaggggcttgtccgcggtcagcgcgtcctcaacaccggctccccaatcactgttcctgttggcagggccacgcttggacgtatcatgaatgttattggtgagccaattgatgagaagggtgacataacaacgaaccacttccttcccatccatcgtgaggcgcctgcttttgttgagcaagccacagaacagcaaattcttgttactggaattaaggttgtggatctgcttgcgccctaccaaagaggtggaaagatcggtctttttggtggtgcaggagtcggcaaaactgtccttattatggagttgatcaacaatgttgctaaggcccatggtggtttctctgtgtttgctggtgttggtgaacgtacccgtgaaggtaatgatctttacagggaaatgattgaaagtggtgtcatcaagctaggtgacaaacagagtgaaagcaagtgtgctcttgtctacgggcaaatgaatgagcccccgggtgctcgtgctcgtgttgggttgaccggtttgactgttgcggaacatttccgtgatgccgaaggacaagatgtgcttttgttcattgacaacattttccgtttcactcaggcgaactctgaggtgtctgctcttcttggacgtattccatctgctgtgggatatcaaccaactcttgctactgatcttggaggacttcaagagcgaattacaactacaaagaagggttccattacatctgtccaagctatttatgtgcctgctgatgacttgacggatcctgctcctgctactacttttgcacatcttgatgctactactgtgttgtcacgacagatctctgagcttggtatttaccctgctgtcgatcctctggactccacatccagaatgctctccccccatgttttgggtgaggatcactacaacactgctcgtggtgtccaaaaggttcttcagaactacaagaatcttcaggatattattgcaattttgggtatggacgagctcagtgaagatgacaagttgaccgtcgctcgcgcaaggaagatccagcgtttcttgagccagcccttccatgtggctgaagttttcacgggtgctcctgggaagtacgtggagctgaaggagagcgtcaacagtttccagggtgttttggatgggaaatatgatgaccttcccgagcagtcattctatatggtgggaggcattgaggaagtcattgctaaagctgagaagatcgccaaggagtcggcttcataagatctcttcattgttaagttctgtacaagttaaatttttggattctggtttctatatgcccgttctgtagccaggacgtgattacaagcaggggtgacatcttctgatgagcgatgtttttttgtcttccttttctccttttacccctaataaggaaccgcagtgacattgtattgtgctgcacaaaagtactcggaacttcgaaagcatgtgtcctttataatgcagatccatgaagcataggatcattgagttcttgttttt

SEQ ID NO: 4801 - DNA, 2241 bp, Gossypium hirsutum
aaaccctagcctctatctgggagccctttccaatggcttcgcgtcgactcctctcctctttcctccgctccacttctcgccgatctctctccaaatctcccagccctacccctcgcctcccttcaccttcccccacgcgccgcccttttccgtgcccctactttctctcacgcgatgctgagtactctacatctgcggctgctgccgcttctgctccatcgcagcctcctcccgctaagaagggcggaaaaggtaagatcactgatgagttcactggtgctggagccatcggtcaggtttgtcaagtaatcggtgccgtcgtcgatgttagattcgatgaaggcttgcctccgattttgactgcgcttgaagtgatggaccactcgatccggcttgtgttggaagtggctcagcacttgggtgaaaacatggttaggaccattgctatggatggaacggagggactcgtcagagggcagccggttctcaacaccggatctcctatcactgtgcctgtcggtagagctactcttggtcgtatcataaatgtcattggagagcctattgacgagaaaggcgaactcaaaaccgaccatttcttgcccatacacagagaagcaccagcctttgtcgatcaagctactgaacaacagatccttgtcactggtattaaggttgtggatctccttgcaccatatcaaagaggagggaagattggactttttggtggtgctggtgtagggaagacagtgcttattatggaacttatcaacaatgttgctaaagcccacggtggtttctcagtgtttgccggtgttggagaacgtactagagagggtaatgacttgtatagggaaatgattgagagtggtgttattaagctaggtgaaaagcaggctgatagcaagtgtgctcttgtttatggtcaaatgaatgagccccctggtgctcgtgctcgtgttggccttactggtctgactgtggctgaacatttccgtgacgctgaagggcaggatgtgcttctcttcattgacaacattttccgttttactcaagcaaactctgaagtgtctgccttgctaggccgtattccatctgctgtcggttaccaaccaaccttggctactgatcttggaggtcttcaggaacgtattaccaccaccaagaaaggttctatcacttctgttcaagccatatatgtgcctgctgatgacttgacagatccagctcctgcaacaacctttgctcacttggatgccacaactgtgttgtcccgacagatctctgagcttggtatttatcctgctgtggatcctttggattctacatctcgtatgctctctcctcatattttgggtgaggaacactacaacactgctcgtggtgttcagaaggttctccaaaactacaagaacttgcaagatattattgctattttggggatggacgagcttagtgaagatgataaattaactgttgcacgtgctcgtaagatccaaaggttcttgagccagcctttccatgtggcagaagtgttcactggtgctcctggcaagtacgtggagttgaaggagagcatcaccagcttccagggcgtgttggatggaaagtatgatgacctgcccgagcagtcgttttacatggttggaggaatcgaggaagtgattgccaaggcagataagattgccaaggaatctgcagcctaatcaaatccacataccttaatttctgctgagtaatttcgaaaataatctaggtggtgttggtaatgccagcaacagaactgttcatttattttgggggtttgttgtttatgtttaatgatgttattcaagagtgtaaaagagcacttcggccccgcttttttctttgcttaaataagggaaatagaaggcggatgtgtacattttttttgttcgaaaacgctggctgctaaagccttatcctttctgactgccgtttattcggaactactgatgttttgaaatgcattcgagactaatgtttcctgaacccatgggggtttcaattttctttttcttaatgaagaaattggcgaattttatcctcaaaaaaaaaaaaaaaaaaaaaaaaaaaaaaaaaaaaaaaaaaacggggcccccctatttcccccccggggggggggccagggaaaagggaccccaatttcccctattaagggggctctaataaaaattatacggggcgcgcctttttacacagggcgggaggtgggggaaa

SEQ ID NO: 4802 - DNA, 3133 bp, Zea mays
tctgagtttctgacctccttcccccgcgtgctcctccagccactccgcaccccagatctccgaaccctaaccccttgcacatgttattgcactgaacgcagctggtagccacaagccatgtcgcagccccgcagttacggaatcctcgtcgccgtccttgtcgcggcggccgtcgccgtcccgccggcgaccgcggcggtggcgagcatcgacctcggctcagagtggctcaaggtcgctgctgtgcatcttgccccaggccgtgctccaatcgctgttgctatcaacgagatgtccaagcgtaagtccccggcactcgcctcgctcgccgacggcaaccgtctctctggggaggaggcggcaggcatcacggcgcggcacccgtccaaggtgttcgcccgcgcgcgggacctcttggccaagcccttgtcctacgtgcagtccgtcacggactcgctcttcctcccctacgatctcgtccccgacgcgcgcggcgccgccgcggttcgcgctgatgacgggcaggtatactccctcgaggagatcgtcgccatggtgctccactacgccgcggggctcgccgatgcgcacgttggggcgcccgtgcgggacgcggtgatcgccgtgccgccctactttgggcaggccgagcgccgggcgttgacgcaggctgcgcagctggctggaatcaacgtgctttctctcatcaacgagcacgctggggccgcgcttcagtacgggattgacaaggacttctccaatgcgtcgcggcatgtcatcttttacgacatgggcgctggtagcacttacgctgcattagtgtactactctgcatacaacgccaaggagttcggaaagacagtgtccgttaaccagttccaggttaaggacgtaagatggaactctgagcttggaggcgttcaaatggaaatgcgtctggtcaactattttgctgcccaattcaataagcagctcggtgatggggttgatatccgtcagtctcccaaggcaatggctaagttgaaaaagcaagtcaagcgcaccaaagaaattcttagtgcaaacactgcagctccaatttcagtagaatctctgtataatgatgttgatttcaggagtaccataacacgtgagaaatttgaagagctgtgtgaggatttatgggagcaagctctaactccagttaaagaagtgctgacacattctggcatgaagatcgatgacatctatgctgtagaactaataggaggagctacccgggttccaaaactgcaggctaagctgcaggaatttctgggtaggcgtggcctggataaacatcttgatgctgatgaagcaattgttctcggagcttcacttcatgctgctaacctgagtgacgggattaagttgaaccgtaagttgggaatgattgatggctctacttatgcttttgtacttgagatagatggcctagattatgtcaaggatgaaagtattgaccaaattttggttccaagaatgaagaaaatgccaataaagatgtttagatccatcagacatacaaaggacttcgatgtctctctcaactatgacaaagcttatgaactgcctccaggcattccatcacacaagtttgcagagtattccgtatcaggactgacagatgccagtgaaaagtatgcaaaccgtaatttatctgcacccatcaaagcaaatctacattcttctttgagtagaagtggaattattgctcttgatagagcagaagcagtaattgagataactgaatgggttgaagttccaaagaagatattgactctagagagtaacatcaccaatcagaattcttcttctgaagtaggagcagctaatagcacaacagatagtaaggaaaatctgagttctggcagtaatactaattcgagcactcccattgatgagagtaatgctcaagaaattattacagagaaggtgctaaagaaaagaacttttagggttccattgaaggttgtggaaaaaacaactggtgctggaacaattctttcgaaggagttgtattctgaagcaaaaaataggttagaggcactcgataagaaggatgcagaacggaggaaaactgctgaacttaagaataacctagagtcatacatatattctatgaaggagaagctggaagaaagcgcagatattttgactgtctcaactgaacaggagagggaatcctttgctgagaaacttagtgaggtgcaggattggttatatatggacggtgaagatgctcaagctaatgaattcaaagagcgtcttgaccagcttaaagccattggtgacccaattcttttcagattgaatgaattaaaaacccgaccaacggcctgtgaaaatgctcgattgtatcttgatgagctgcaaaagattgttaagaactgggagacaaacaaaccatggctcccccaaaagagagtagatgaggttgtaagtgaagcagagaaagtgaaagcttggctgaaggagaaggaaaacctgcagaaaaatacccctgtctttaacccaccagttttcacatctgaagaagtttctgagaaagttctggacttacaagataaggtctcaagtgtcaataggattccaaaaccaaaaccgaaggtcgagaagaaaacagcaaaggaggaagaacctgctagcaaggagaaaaccacctatacggaatctgcacccgacgagggtgaatacaccgaaacgtctcagaaatctaaggctcaagaagaggatcagtctgcatcagccaacactagtgattcagaacctgaacctcatgacgagttgtgagaagcagaatccataggaacaggtcgggacgacgcattacgcatgtactacaagaaggcagtttgaggataaattttggttgctcatttttttccaaaattttatttgacgaccgaaagacgaggctatgtaggtgttgaggaacactagatgctgtagggccaaaaatattttatcggtagtttctgattgctgtatagcagcctcatcgttgtgtaagttactcgcctcgaaggcgtagttcaggatctagaatcgctttgttatactgaactcatttcattttttaatgaagaatgctatataggattttacgtcagta

SEQ ID NO: 4803 - DNA, 3342 bp, Hordeum vulgare subsp. vulgare
ggtgctcccgccccgtccacactcgcgagctccagatccccgaaccctgacccccccgcatgccatcccactagcccgctcgctcgctcccccgcatggcgccgcgtctcctgctcctcgccctcgtcgcggcggccgtggccgtgccgccggcgagcgccgcggtggcgagcatcgacctgggctccgagtggctcaaggtcgcggccgtgcacctcgcgccgggccgcgccccgatcgccgtcgccatcaacgagatgtccaagcgcaagtcccccgcgctcgccgcgctggccgacggcaaccgcctcgccggcgaggaggcggccggcatcaccgcgcgccacccggccaaggtcttctcccgcatgcgcgacctcctcgccaagcccttcccctacgcgcgggccctcgccgactcgctcttcctcccctacgacctcgtccaggacgcgcgcggcgccgccgcggtgcgcgccgacgacggccaggtctacaccgtcgaggagatcgtcgccatggtgctccactacgcctccgggatcgccgacgcgcacgtcggcctgcccgtgcgggacgccgtcgtcgccgtgccgccctacttcggccaggccgagcgccgggccctcacgcaggcggcccagctcgccgggttcaacgtcctggcgctcgtcaacgagcacgccggggccgcgctgcagtacgggatcgacaaggacttctccaacgagtcacgccatgtcatcttttacgacatgggctcaggcagcacctacgccgcgctcgtctactactcgtcctacagcgccaaggaattcgggaagacggtgtctgtcaaccagttccaggttaaggatgtcagatggaactccaaacttggaggccttgaaatggaaatgcgtttggtaaactattttgctgatcagtttaacaagcagcttggcaatggggatgacatccgtcagtctcctaaagcaatggctaagttgaagaagcaagtcaagcgcaccaaagaaattctgagtgcaaatactgctgctccgatctcagttgaatctctatataacgatatcgatttcaggagcacaataactcgtgaaaaatttgaagagctttgtgaagatttatgggagcaggctctgactccaattaaagatgtgcttgcccagtcaggcatgaaaattagtgacatctatgctgtagagctaataggaggagctaccagggtaccgaaactgcaggctaagctgcaggaattcctgggacggagtgagctagataagcaccttgatgctgatgaagcaattgttcttggtgcctcactgcatgctgctaatctaagtgatgggattaagttgaaccgtaagttggggatgattgacggttctacttatggtttcgtgtttgaaatagatggcccagattatgtcaaagatgaaagtactgatcaagtactggtgccaaggataaaaaaaatgccgataaagttattcaggtcaatcaaacatactaaggactttgatgtgtctcttagctatgacaaagcttctgagttgcccccaggtgttttatcacacaagtttgcggattatgctatatcaggcctgacagaaaccactgaaaagtatggaagccgcaatttatctgcacccatcaaagcaaatctacatttttctttgagtagaagtggaattatttctcttgatagggcagaagcagtgattgagataactgaatgggttgaagttccaaagaagaacgtaacactagagactaataccaccgatcagactttgtctgctgaatcaggaacatctgatagtacaacggatagtaaggagaattctagttcaggaagtgatgctgataattctagcactaccaatgatgagagcaatgtgcaagatactattacagagaaggtgctgaagaaaagaaccttcagggttccattgaaggtcactgaaaaaacagctggtgctgcatcaatcctttcaaaggagctgtattctgaggcaaaaagtaggttagatgtacttaataagaaggatgctgaacggaggagaactgctgaactgaaaaataacctagagtcttacatatactctatgaaggaaaagttggaggaaagcacagatatgttgaccgtctcaactgaacaggagagggaatcttttacagaaaaactcagtgaggtgcaggattggctgtatatggatggtgaagaggctcaagcaaacgaatttcaagagcgccttgatcagcttaaggccatgggcgacccaattcttttcagaatgagtgagttaaaagcccgaccagcagcttgcggaagtgctcgattatatcttactgagctacaaaagatcgttaagaactgggagacaagcaaaccatggcttccaaaaaagagagtagatgaggtcgtaagtgaagcagataaactgaaagcttggttggaggagaaggaagccctacagaagagcacccctgtccacagcttgcctgctttcacatctgaagaggtctataagaaagttttagccctacaagataaggtctctagtgtcaataggattccaaagccaaaacccaaggttgagaagaaacctccaaaggaagacgctaacaaggacaagacggactcttcagaatctgcatccagcgagcctgagcctgagtccaccgagaagtcgtcggaatcagatgccccggaaaagactaacgattcagaaccagaatctcatgatgagttgtgattattaggatcagcttttgatccccctgggagagatactgctcaatatactccgagaagatagtttgtaccacagttttgtttgacggccgaaagacgaggtttgtgtaggaattcgcggcaggctagatgctatatgggcgagaagaatttgatataaatccctgtatagcagtattgtggtctctagggcatatgctgtcaagatagcgccttgaaaggcttagttgtcaggactgagaagactttgtagctgcattgttgtactgaaactcatttatattttgataacagctactatagagatttcatgtctggtaggggtatcaatgtaccttttagctctttcatactgtctatcacgcattgttgtgaactttcagttaaaggaataagagtgcatccgccttcaggcatgaaaaaagcggtaggcgtaagttaggcggtggcaagacagtaatatagcttttgttgtcagggtgtatctgtggttattatacgtgtatcgatgttaatataggagttggattatgaaacatttcccgtatcagttcaatatgacataattttttagttgggtagac

SEQ ID NO: 4804 - DNA, 980 bp, Zea mays
aggtgatggtgcctgtgccttatgtcatggcgccaagcgcaccgtgcagcccaagaaccgcggccatggccggcgccgaccacctccaggcctactgctacttcttctccagcgccccgacgagcccgtccagggcgagctgcaactgcaaccccgcgtcgtcgtcgccgggtggcgacgaggccgccagcacgttcgacttcacgctcgggttcagcgggcagctgcaggaggccacgccgaccctcgcggccgccgacgagctcttcgagggcggcaggattcggccgctgaacgcgccgcacccgagcattctgcgggtcgacgacgccgcctcctccggctccgccggtggcactcggtgctccccgaggagagccggcggcgcggatcgtcaagcggaggcgacgccgttggagagaggcaggtcgggctgcaggccctccgccgccgccgctgcggcgccttcttcgtcgaggagcaggaccaggagggccacgcggtctctgtccccgttcaggggcggcagtggcctggacgccgccgccgctgacgacgtcgacgacgagtcccctcctccgtctccccgagcctcctccatgatacgtggctgcggcagcggcagcggcagcaggaagtggcggctcaaggacctgttcctcttccgcagcgcgtccgagggccgcgccaccggcaaggacccgctcctcaagtacaccgcgttgtcgtcggcgtcgttctggcacccccacggccagccccagaggctaagcagcgcgtccatgcgcaagggaagagggtcggcggcgtcggccagcggcgacacgccgttcgccacgaccaaccgggcggccgccgccgaggacgtgcggcgccggacgaccaccaccaccaccaccacgccgctgccgttccaccgcaacagcctgttcggctacctgcgctccaacccggcgatccacagcatcagcaggaagctg

SEQ ID NO: 4805 - DNA, 1030 bp, Zea mays
ggccggcggcgaccacctcccggcctactgctacttcttctccagcgccccgacgagcccgtccagggcgagctgcaactgcaaccccgcgtcgtcgccgccgggtggcgacgaggccagcacgttcgacttcacgctcgggttcagcgggcagctgcaggaggccacgccgaccctcgcggccgccgacgagctcttcgagggcggcaggattcggccgctgaacgcgccgcacccgagcattctgcgggtcgccaacgacgcctcctccggctccgccgatggcactcggtgctccccgaggagagccggcggcgcggatcgtcaagcggaggcggcgccgttggagagaggcaggtcgggctgcaggccctcctccgccgccgctgcggcgccttcttcgtcgaggagcaggagcaggagggccacgcggtctctgtccccgttcaggggcggcagtggcctggacgccgccgccgctgacgacgtcgacgacgagtcccctcctccgtctccccgagcctcctccatgatacgtggctgcggcagcggcagcggcagcaggaagtggcggctcaaggacctgttcctcttccgcagcgcgtccgagggccgcgccaccggcaaggacccgctcctcaagtacaccgcgctgtcgtcggcgtcgttctggcacccccacggccagccccagaggctaagcagcgcgtccatgtccatgcgcaagggaagagggtcggctgcgtcggccggcgacacgccgtacgccacgatcaaccgggcggccgccgccgaggacgtgcggcgccggacgaccaccgccaccaccacgccgctgccgttccaccgcaacagcctgttcggctacctgcgctccaacccggcgatccacagcatcagcaggaagctggggggcagcggccactccggctcgtcctcgtcctccagccgcggaggcaggcaggcagcaggccgacatgacgatccgtacgcacgcacggcacgacgcacagcaccgcaccaggaatct

SEQ ID NO: 4806 - DNA, 1434 bp, Zea mays
aacgacctgcctgccttgctcttgccctgtgagcagcggcgtgcgatcgatcgaggcagtcgtagtaataagccaacaaacaaaccggccggaacgccatgctggaggagtacaaaccgtgtgcggccatggtggtgacgcagtgcatctacgccgctctagcgctcttgtccaaggcggcgttcaccggcggcatgagccccctggtgttcgtcgtctacaggcaggccgtcgccaccattgtactcgtccccgtcgtcatcgcggccaacaggaagaagatgaaggagatgacgacgggccttggactgacgggcttctcgctggtcttcgtcgcctcccttgtcggggcaacggtgaaccagtgcatgtactaccaaggggtgaatctgggctcgtcgtcgatggcaacggccatgaccaacttgatccccgccatcaccttcgtcatggcggcatcagtcggcctagagagggtggaggccaggaggccgaggagcctggccaagatcttcggcacggccgtctgcgtgagcggcgccatggccatggctttcttcaagggcccgaagctgctcggcgacggcccgaacgctctccagctcctcctccacgcgggcggcggcggcaggtgggtggccggcgcgctcttcctcgtgggcagcagctcctgctggtcgctctggctcatcctgcaggtgcccatctgcaagtcgtacgtggagccgctggctctgtcggcgtggatgtgcgtcctgtccacgctccagtccgcgctgctcgtctccttcctcctgccggaccccagcgcctggaggatccactcgctcttcgagctctcctgctgcgtcttctcgggcgtgttcgggtccggcgtcacgttctacctgcagtcgtggtgcatctccgtgaggggcccgctctactccgccatgttcaacccgctctgcaccgtgatcaccaccgtgttcgccgccgccgtcctccgcgaagagctgcacgtcggcagcttgctgggcgcgatcgccgtcatcgcggggctgtacgtggtgctgtggggcaaagcgggcgacgccaacaagggcggggtggagccagagcaccactcggacgatctggagaagacgtcatcagcgcggtcggatcccaattcgacggccggcgtcggcagtggcatcgccgagcccctcctggcgggcggcgatccaacggagaagtagatgggattttgctgctcttcaagtgttctgtgcgtgcgcgcgcggtgttttcagggtcggtatgctagtgctactgtaacagtgccgtcccagttttgtcatgtacactagtggcagcttcaaatgactccgtgctgccgatgtgtattatccgcacaattttgttaagcaacgcggcgtccccgtcaaaaaaaaaaaaaaaaaacggcacgag

SEQ ID NO: 4807 - DNA, 1143 bp, Sorghum bicolor
atgggcatggaggagtacaaaccgtgtgcggccatggtggtgacgcagtgcatctacgcggctctagcgctctggtccaaggcggcgttcaccggcggaatgagccccctggtcttcgtcgtctacaggcaggccgtcgccaccattgtgctcgtccccgtcgccgtcgcggccaacaggaggaagatgaaggagatgatgggccgccttggaatgacaggcttctccttggtcttcgtcgcctctcttgtcggggcgacagtgaatcagtgtttgtactaccaaggggtgaatctgggctcgtcgtcgatggcaacggccatgaccaacttgattccggccatcaccttcgtcatggcagcatcagtcgggctagagagggtggaggtgaggaggcctcggagcctcgccaagatcttcggcacggccgtctgcgtgagcggcgccatggccatggccttcttcaagggcccgaagctgctgctgggcgacctgcacgacgctctcctcctccccctccactcgccggcggcgggcggcggcagcagcaggtgggtggcgggcgcgctcttcctggtgggcagcagctcctgctggtcgctctggctcatcctgcaggtgcccatctgcaagtcgtacgtggacccgctggcgctgtcggcgtggatgtgcctcctctccacgctccagtccgcgctgctcgtcgccttcctcctgccggaccctgccgcctggcggatccactcgctcttcgacctctcctgctgcctcttctcgggggtgttggggtcaggcgtcacgttctacctgcagtcgtggagcatctcggtgagaggcccgctctactccgccatgttcaacccgctctgcaccgtgatcaccaccgtcttcgccgccgccgtcctccgtgaagagctgcacgtcggcagcttgctgggcgcgatcgccgtcatcgcggggctgtacgtggtgctgtggggcaaagcgggcgacgccaagaggcgggggctgcaggaccaggagccagagcagcactcggacgacgacttggagaagacgtcggcgcggtcggattcgatggtcgacgtcggcaatggcatcgccgagcccctcctggccggcggcgatccaacggcgaagtag

SEQ ID NO: 4808 - DNA, 1426 bp, Oryza sativa Japonica Group
ggtgagccgccggccgcctgcgcacttgagctccacttcctctcgcgggaggcgtcagccgagagccacagccaacagcaatgggggccggatgggaggagtacaagccgtgcgcggcgatggtggcggcgcagtgcatctacgcggcgctggcgctctgggccaaggccgtgttcaccgggggcatgagcaccatggtcttcgtcgtctaccgccaggccatcgccaccgtcttcctcgtccccatagccatcattgccaacagaaggaagaagaaggagacgaggctaggaatgacgggcttctccttgatcttcgtggcttctctttttggggcaacggtaaaccaatacgtgtactaccagggcctgcatctgggatcgtcgtcgatggcgacggccatgagcaacctgatacccgcgatcaccttcgtgatggcagcgtcagtaggactagaaaaggtggacctcaggagagtgaggagcttggcgaagatattcggcaccaccgtctgcgtcggaggagccatggccatggcgttcttcaagggccccaggctgctcaactcctcctctctgatcgtcgacctgaactttcttctccactcgtcagcgagcagcaagtgggttatgggcgccctgttcctcatctgcagcagctgctgctggtcactctggctcatcttgcaggtgccaatctgcaagtcgtacatggatcccctgacgctgtcggcgtggatgtgcttcctgtcgacgctgcagtcggcggtgctcgtctccttcctcgtgccggacatcaacgcctggaagatccactccctattcgagctcggatgctgccttttcgccggcgtgtttgggtcaggcgtgacgttctacctgcagtcgtggtgcatctcggtcaggggccctctctactccgccatgttcaacccgctctgcaccgtcatcgccaccgtcgtcgccgccgccttcctccacgaggagctgcacatcggcagcttgttcggggcgacggccattgttgccgggctgtacatcgtgctgtggggcaaagcagcggatggcggcggcaagagcggcgggagtgtgccggagcacagccacgacgtggagaaggcggcgatgcggtcggaatcgcagctcgacgtgggtgaaggcatcacggagccgctcctagaggccggcaacacggccgagaagtagggtagaggagattttgaagttgatagccagttgtatcttctacaaacgttttttttttatttatgtctcctggtagggagagcatggtattttggatgtaactatataacattcgaaagtatttagtatggataattttcaaatgtaactattgtataattattctgtaactatcttatagttttttttttaaccaaaggcaggagctctgccattgtatt

SEQ ID NO: 4809 - DNA, 2165 bp, Zea mays; identical to SEQ ID NO: 1116

SEQ ID NO: 4810 - DNA, 2564 bp, Sorghum bicolor
gccaagaatcgccactccgctaccttcactcgctcactcagaatgcggcgccatggcgaggtatgcgtgatctttgctgtggccgccgccgccctcttggtggccgcggcgaccccagccgcggctggtcgggaggatcggcagacctacatcgtccacatgtcccattccgccatgccgagtgatttcgtggagcatgaggagtggtacgccgcgtcgcttcaggcggtgtcggacgccgccaccgtgctgtacacctacaacaccctcctccacggctactcggcgcggctgacgcgcgcggaggccgcggcgctggagtcgcagcccggcgtgctcgtcgtcaacccggaggtgcggtacgagctgcacaccacccggacgtgggagttcctggggctggacggcacggacgcgctgttcccgcagtcgggcaccgggtccgacgtcatcgtcggggtgctcgacaccggcgtgtggccggagaggccgagctatgacgacacggggttcggccccgttccggcgggctggaagggcaagtgcgaggacggcaacgacttcaacgccaccgcgtgcaacaagaagctcatcggcgcgaggttcttcctgacgggctacgaggcggccaagggccccgtggacacgtccaaggaatcccggtcgccgagggacaacgacggccacgggacgcacacgtcgagcaccgcggcgggcggcgccgtccagggcgcggacctgctcggctacgccgccggcacggccaagggcatggcgccccgcgctcgcgtcgcgacgtacaaggtgtgctgggtcggcggctgcttcagctccgacatcctcaaggccatggaggttgcagtgacggacggcgtcgacgtgctctccctctccctcggcggcggcacggcggagtactaccgtgacagcatcgcggtgggcgctttcagcgccatggaaaaggggatcttcgtgtcctgctccgcgggcaatgccggcccgggcgccgcgacgctgtcgaacggcgcgccgtggatcaccaccgtgggcgccggcaccatcgaccgcgacttccccgcctacgtcatgctcggcaacggcaagaactacacgggcgtgtccctctacagcggcaagctattgcccaccacgccggtgcctttcatctacgcggggaacgcgtccaacagcagcatgggccagctctgcatgtccggcagcctcatcccggagaaggtggccggcaagatcgtgctctgcgaccgcggcaccaacgccagggtccagaagggcttcgtcgtcaaagacgccggcggcgctggcatggttctcgccaacaccgccgccaacggcgaggagctcgtcgctgacgcgcacgttctcccgggctccggcgtgggggagaaagccggcaacgccatgagggactacgccatgtcggatccgaaggcgacggccaccattgtgttcgccggcacgaaggtcggcatcaagccgtctcccgtcgttgcggccttctcctccaggggccccaacactgtgacgtcgagcatcctgaagccggacgtcatcgcgcccggcgtgaacattctggcggcgtggtcggggtccgtcggcccctcggggctccccggcgacagccgccgcgtgggcttcaacatcatctccgggacgtccatgtcgtgcccgcacgtgagcgggcttgcggcgctgctccgcgcggcgcacccggagtggagcccggcagccatccggtcggcgctgatgacgacggcgtacaacgattacccaggcggcgctggcatcctggacgtggccacgggccggccggccacgccgctggacgtgggcgccggccacgtcgaccccgcgaaggccgtggacccggggctggtgtacgacatcaccgcggcggactacatcgacttcctctgcgccaacaactacgagccggcgcagatcgcggcgctcaccaggcagcacccgtccgaggggtgcagcgccaaccgcacgtacacggtgaccgcgctcaactacccgtccttctccgtggcgttcccggccgccggcggcacggtgaagcacacccgcacggtgaccaacgtcgggcagcctggaacgtacaaggtgaccgccagcgccgccgccggcagcgccccggtgacggtgtccgtggagccgtcgacgctgagcttcagcaaggccggcgagaagcagagctacacggtgagcttcacggcgggcgggatggcgtcgggcaccaacgggttcggacggctcgtctggtccagcgaccaccacgtggtcgccagcccgatcgcggcgacatggacctaatagctagcggccggtagcaatggcgagataaatctccgattggggatggcaatggcgagcggcattcttgaacgcaagagacggcggatatcgtcgaggagtgctgtttgtattgtatcagttgattagctccggtgtgtaagctgccggtgtaatgtaatctgtaactgacccgattgtggtgatgcagcaattaatctcaaagggttgcagtcttgcaggctttc

SEQ ID NO: 4811 - DNA, 2625 bp, Zea mays
acgcgctcaattccactgccaagattcgccactccgtccgttaccttcactcgctcactcacaatgcggcgccatggcgaggtacgcgtgatctttgctatggccgccgccgccgccgccgcgctcttggcgtcggcggccgtggccggacgagacggccggcagacctacatcgtccacatgtcccattccgccatgccggacgagttcgcggagcatgaggaatggtacgccgcgtcgcttcaggcggtgtcggatgccgccaccgtgctgtacacctacagcaccctcctccacggctactcggcgcggctgacgcgcgcggaggccgcggcgctggagtcgcagcccggcgtgatcgtcgtcaacccggaggtgcggtacgagctgcacaccacccggacgcccgagttcctggggctggacggcacggacgcgctgttcccgcagtcgggcaccgggaccgacgtcgtcgtcggggtgctcgacaccggcgtctggccggagaggccgagctacgacgacaccgggttcggccccgtgcctgcgggctggaagggcaagtgcgaggacggcaacgacttcaacgcctccgcgtgcaacaagaagctcatcggcgcgaggttcttcctgacgggctatgaggcggccaagggccccgtggacacgtccaaggaatcccggtcgccgagggacaacgacggccacgggacgcacacgtcgaccaccgcggcgggcggcgccgtccagggcgccgacctgctcggctacgctgccggcacggccaagggcatggcgccccgcgcccgcgtcgccacgtacaaggtgtgctgggtcggcgggtgcttcagctccgacatcctcaaggccatggaggtcgccgtgacggacggcgtcgacgtgctctcgctctcccttggcggcggcacggcggagtactaccgcgacagcatcgcggtgggcgccttcagcgccatggagaaggggatcttcgtgtcctgctccgcgggcaatgccggcccgggcgccgcgacgctgtccaacggcgcgccgtggatcaccaccgtgggcgccgggaccatcgaccgcgacttccccgcctacgtcacgctcggcaacggcaagaactacacgggcgtgtccctgtacagcggcaagccgttgcccaccacgccgatgcccttcatctacgcggggaacgcgtccaacagcagcatgggccagctctgcatgtccggcagcctgatcccggagaaggtggccggcaagatcgtcctttgcgaccgcggcaccaatgccagggtccagaagggcttcgtcgtcaaagacgccggcggcgccggcatggttctcgccaacaccgccgccaacggcgaggagctcgtcgccgacgcgcacgttctcccgggctccggcgtgggggagcaagccggcaacgccatgagggactacgccatgtcggatccgaaggcgacggccaccatcgtgttcgccgggacgaaggtcggcgtcaagccgtctcccgtcgtcgcggcattctcctcccgtggccccaacactgtgacgtcgagcgtcctgaagccggacatcatcgcgcccggcgtgaacatcctggcggcgtggtcggggtccgtcggcccgtcggggctccccggcgacggccgccgcgtcggcttcaacatcatctccggcacgtccatgtcgtgcccgcacgtgagcgggctcgccgcgctgctccgcgcggcgcacccggagtggagcccggcagccatccggtcggcgctgatgacgacggcgtacaacgagtaccccggcggcaacggcatcctggacgtggccacggggcggccggccacgccgctggacgtgggcgccggccacgtcgaccccgccaaggccgtcgacccggggctggtgtacgacatcgccgcggcggactacgtcgacttcctctgcgccaacaactacgaggcggcgcaaatcgcggcgctcaccaggcagcacgcgtccgaggggtgcagcgccaaccgcacctacgcggtgaccgcgctcaactacccgtccttctccgtggcgttcccggccgccggcggcacggcgaagcacacccgcacggtaaccaacgtcgggcagcccgggacgtacaaggtggccgcgagcgccgccgccgccggcaccccggtgacggtgaccgtggagccgtcgacgctgagcttcagcagggccggcgagaagcagagctacacggtgagcttcacggcgggcgggatgccgtcgggcaccaacgggttcgggcggctcgtctggtccagcgaccaccacgtggtcgccagcccgatcgcggcgacgtggacctaatggctagcggcggccgtaccgtagcaatagcgagataaaatcccgattgggggacggcaatggcgagcgcgcgccattctcgaatgcgagagagatggcggatatcgtcgaggatgtgctgttgtattgtgtgcatgagtccgctccggtgtgtaagctgccggtgtagtgtaatctatctgtagctgacccgattgtagcgatgcagcaattaatctcaaaagggttgcagacttgagcacttcttccaaaaaaaaaaaaaaaaaa

SEQ ID NO: 4812 - DNA, 2812 bp, Oryza sativa Japonica Group
ggtcatgtggtggtggagaggctaaaaaaccagagataaaatgagagcaacgccatgtgcttcaccctcttccttcttctatctcgctcgccttcccttcgctgaagcatccgtccatctgttcgctttgtcctcttgcaatcattcactctccttgctcgattctataaacacgcagtgaggctccgatccgccatcggctcaccgccattgctgaggaacacagctttctcttttttttcccacgatgtggcgccatggcgagagatgtgtgatccttgctgtcgccgccgtggctcttgtcgcggcggcgacggcaacggcggcggcggccgttgggggtgagaggaggacgtacatcgtgcacatgtcgcggtcggcgaagccgaacgatttcgtggagcacggcgagtggtacgcggcgtcgctgcagtcggtgtccgacgcggccaccgtgctgtacacctacgacaccatcgtccatggctactcggcgcggctgacgcgcgcggaggccgaggcgctggagtcgcagcccggggtgctcctcgtcaacccggaggtgcggtacgagctgcacacgacgcggacgccggagttcctggggctggaccgcacggacgcgctgttcccgcagtcgaacaccggcagcgacgtcatcgtcggggtgctcgataccggcgtgtggccggagaggccgagctacgacgacgccgggctcggccccgtgccggcgggatggaaggggaagtgcgaggaaggcaacgacttcaacgcctccgcctgcaacaagaagctcatcggcgcgaggttcttcttgaccgggtacgaggcggcgaagggccccgtcgacacgtccaaggagtcgcggtcgccgagggacaacgacgggcacggcacgcacacctccagcacggcggcgggatccgccgtgcgcggcgccgacctgctcgggtacgccgccgggacggccaagggcatggcgccgcacgcgcgcgtcgcgacgtacaaggtttgctgggtcggcgggtgcttcagctccgacatcctcaaggccatggaggtggcggtgaacgacggcgtggacgtgctctcgctctcgctcggcggcggcaccgcggactactaccgcgacagcatcgctgtgggcgcttacagcgccatggaaagggggatcttcgtgtcctgctcggcggggaacgccgggccaggctcggccacgctgtcgaacggcgcgccatggatcaccaccgtcggggccgggacactcgaccgcgacttccccgcccacgtcgtcctcggcaacggcaagaactactccggcgtctccctttacagcggcaaacagctgcccaccacgccggtcccattcatctatgccgggaacgcgtcgaacagcagcatgggcgcgctctgcatgtccggcagcctaatcccggagaaggtcgccggcaagatcgtcctctgcgaccgtggcaccaatgccagggtccagaagggcttcgtcgtcaaggacgccggtggcgccggcatggtgctcgcgaacaccgccgcgaacggcgaggagctcgtcgctgacgcgcacgtcctcccgggcgccggtgtcgggcagaaggccggcgacaccatgagagcgtacgcattgtccgatccgaacccgacggcctccatagtgttcgccggaacacaggttggcatccagccatctcccgtcgtggccgcgttctcgtccagggggccgaacaccgtgacgcccggcatcctcaagccggacctgatcgcgcccggcgtcaacatcctcgcggcgtggtccggatccgtcggcccctcggggctcgccggcgacagccgccgcgtcggattcaacatcatctccgggacgtccatgtcgtgcccgcacgtgagcgggctggcggcgttgctccgcgcggcgcaccaggactggagcccggcggcgatccgctcggcgctgatgaccacgtcgtacaacggctaccccaacggcaacggcatcctcgacgtggccaccggcctcccggcgacgccgctcgacgtcggcgccggccacgtcgaccccagcaaggcggtggatccgggcctcgtctacgacatcgccgccgccgactacgtcgacttcctctgcgccatcagctacgggccgatgcagatcgccgcgctcaccaagcacacgacggacgcctgcagcggcaaccgcacgtacgcggtgaccgcgctcaactacccgtcgttctcggtcacgttcccggcgaccggcggcacggagaagcacacccgcacggtgaccaacgtcggccagcccggaacatacaaggtgacagccagcgccgccgcaggcagcacgccggtcacggtgtccgtcgagccgtcgacgctgacgttcaccaagtccggcgagaagcagagctacacggtgagcttcgcggcggccgcgatgccgtccggcacgaacgggttcggccgcctcgtctggtccagcgaccaccacgtcgtctccagcccgatcgccgtgacatggacctgaccgtcgtcgcgctcatagctagatcttctggatgatccatcaatggcgggcgcaagagattatccgggataattagcgtgtaatctgccgattagtgtggcgaagtatcgtttcaatttcttagctccagccttgtttagttgttcgaactgtggcatagcgaggaagtgagtgagtgagtgagagtgatccgagttagctccactcctaacaggagtccaaaaaaattaaaggataatgaatggaccagcaaagcaagtggttgctcgt

SEQ ID NO: 4813 - DNA, 2781 bp, Hordeum vulgare subsp. vulgare
ggcctcactcgtccctctccctcactcgtctcactcctctgagctctgagcaatccatccatccgtttcttgtctggttgcaatcatttcgctcccctgctgattctataaaaacgccggcacgatctacctcgcactcccactcacaaggtgacacttccagctccagagcttctcacgatgtggtgccatggcaggagatccgcgctcttcgccgtggccgtcgcggccatcttggcggcggcggcggcggcgggggaggtcgtgcacgacggccggaggacgtacatcgttcactgctcgcacgcggccatgcccagcgagttcgcggcgcacgccgactggtacgcgtcctcgctgcagtccgtgtccggcggcgccgccgcggtgatctacacctacgacacccttctccacggctactcggcgcggctcacccgcgcggaggcccgggcgctggaggcgcagcccggcgtgctgctcgtcaacccggagacacggtacgagctgcacaccacccgcaccccggagttcctcgggctggaccgggcggaggcgctgttccccgagtccaacaccgccagcgacgtcgtcgtcggcgtgctcgacaccggcgtctggccggagagggccagctacgacgacgccgggttgggacccgtgccggcgggctggaagggcaagtgcgagggcgggagcgacttcaactcctccgcgtgcaaccggaagctcatcggcgccaggttcttcctggcgggctacgaggcgtccaagggccccgtggacacgtccaaggagtcgcgctcgcccagggacaacgacggccacggcacgcacacctcgagcacggcggcgggctccgccgtgcacggcgctgacctgctgggctacgcgtcagggacggccaagggcatggcgccccgcgcgcgcgtggccacgtacaaggtgtgctgggtcggcggctgcttcagctccgacatcctcaagggcatggaggtcgccgtcgccgacggcgttgacgtgctctccctctccctcggcggtggcacgtctgactactaccgcgacagcatcgccgtgggcgcgtacagcgccatggaaaaggggatttttgtctcctgctcggcggggaatgccggaccgggtgcggcgtcgctgacgaacggcgcgccttggatcaccaccgtgggcgcggggacgctcgaccgcgacttccccgcctacgtcaccctcggcaacggtaacaaatacgacggcgtctccctctacagcggcaagcaattgcccaccacgccggtgccgttcatctacgcagggaacgcgtccaacagcagcatgggcgcgctctgcatgacaggcaccctcatccccgccaaggtcgccggcaagatcgtcctctgcgaccgcggcaccaacgccagggtccagaaggggttcgtcgtccgagatgccggtggtgccggcatggtgctcgcgaacaccgccgccaacggagaggagctggtcgccgacgcgcatattctcccgggcgccggcgtaggagagaaggccggcaacgccatgagaacctacgcgtcgtcggatccaaagccgacggccaacatagtgttcgctggcacgaaggttggggtccagccgtcgcccgtcgtggccgccttctcgtcgagggggccgaacaccgtgacgcccggcatccttaagccggacctgatcgccccgggggtgaacatcctcgcggcgtggtccggatccgtcggcccatcggggatcgccgacgaccaccgccgcacgagcttcaacatcatatcgggcacgtccatgtcatgcccgcacgtgagcgggctggcggcgttcctccgctcggcgcaccaggactggagcccggcggccatccggtcggcgctgatgacgacggcgtacgccgcgtaccccaacggcgacggccttctcgacgtggccaccgaactcgccgccacgccgctggacatgggagccgggcacgtcgaccccagcaaggcggtggacccggggctggtgtacgacctcaccgccgccgactacctggacttcctctgcgccatcgagtacgagccggcgcagatcgccgcgctgaccaagcactcctcggaccggtgcagcgccagccgcacgtactccgtggccgcgctcaactacccgtcgttctcggccacgttcccggcggccggcggcacggagaagcacacccgcactctgaccaacgtggggaagcccggcacgtacaaggtgacggcggccgcggcggcgggcagcacggcgatcaaggtgtcggtggagccgtcgacgctgagcttcagcaaggtgggcgagaagaagagctacaccgtgagcttctcggccggcgggaagccgtcgggcaccaacgggttcggccggctcgtctggtccagcgaccaccacgtggtggccagcccgatcctggcgacgtggacctgaccaccacgcccggcggtaggtgctgtactaattagcaatgccgtcgaggggaagaacgcggcggggcagcaatggcgccgccgttctcgatcggatggatgcgtgcgtgtgtgtcgatttggcgtggtgatttactgatttgccgtctcattttcctgctgccgcttgcttgccagtgcagcctgtgctagtagtgagttgtggcaacgtgtgtgtcaactgggcatagatttgtttggatttctaaagcatggtgagtgaagaaagcgagtgattgattgatcaaagttgggtgttagtaggtcc

SEQ ID NO: 4814 - DNA, 2087 bp, Zea mays; identical to SEQ ID NO: 1117

SEQ ID NO: 4815 - DNA, 1787 bp, Sorghum bicolor
cctccacctcctgcctctgcctctgcctgcgtagtttgcacaccacaaccgtctttcgttcccaagaaagcaccgccgccgctcttcgttctcgatcccgcaaggcccgtccttccatggccatcgcctcccgtgtcacgaagcgcgcgctgtccaccttcgccgccgccaagctcccggaggaggcggtcgcggccgcggccgccggcgaggcgatcgcggccacaaccgcggccgcggtgccgttggcgtcgtccgagcggaccgccatcgccagggcggcgctgctgcagttcgaggacaccgggcggctgttcgcgggggagccgacgtcggcgctgctgcgcacgctcgccgcgctgcaggcgctgtccgtgggcccgctggtggacgccgccaccgcggcgctgcggtcgccggcggtggccggcagcgcgctgggcagggccgcggccagggccacggcgtaccggcacttctgcgctggcgagaccgcggacgaggccgcggcggtcgtgcgccgcctctggcgcgggggcatgggcgggatcctggactacgggatcgaggacgccgaggacggcgacgcgtgcgaccgcaacgccgccgggttcatctccgccgtcgacgtcgccgccgcgctgcctccgggctcggcgagcgtgtgcatcaagatcaccgcgctgtgcccgatcgcgctgctggagaagacgagcgacctgcttcggtggcagaagaagcacccatcgttcaacctgccatggaagacgcactcgttcccgatcctgtctgactcgagcccgctccacctgaccccgtcggagccgcctgcgctgacgtcggaggaggagacggagctgcagctggcgcacgagcgtctgctggcggtgtgcgcgcggtgcgcggagcacggcatcccgctgctggtggacgcggagtacgcgacggtgcagccggccatcgactacttcaccttcgtgggcgcgctggcgttcaacgacggcgccggcgccggcgactgcgagcagcggcccatcgtgcacggcaccatccaggcgtacctccgcgacgcgcgggaccggctggaggccatggtgcggtcggcggagcgtgagcgggtgcggctggggctcaaggtggtgcgcggcgcgtacctggcccgcgagaccaggctcgcggcgacgctcggcgtgccgtcgccgatccacggcagcatccaggagacccacgactgctacaacggctgcgcgggtttcctcctggaccgcgtccgccggggcaccgcctccgtgatgctcgccacccacaacgtggagtccgggaagctggcggcggcgcgcgcgcaggagctcgggatccccaggggagaccggaacctgcagttcgcgcagctgatgggcatggcggacgggctgtcgctgagcctccgcaacgccgggttccaggtgagcaagtacctgccgtacgggcccgtggagcagatcatcccctacctcatcaggcgcgccgaggagaacaggggactcctctccgcgtcgtccttcgacaggcacctgctccggaaggagttggtgaggagggtcaagaccgcagtggtgggaatgggacgtgagtgagtgaagtgaacttgccgagcctgtgatggatgaggccgtgaagctgggacaagggcgagttgaaggctagtagaagctgtaaatacacccttcaacagtcttcagacattgatgatgatgtatccggggcttttcttgaataattcgaatgaatcgaataatgttcttggt

SEQ ID NO: 4816 - DNA, 1960 bp, Zea mays
acttggactccgcttcctcgaggaccttcacgaaaacagccgccctctactttccgttgcccttttcctggttatataagtcgccgcgccggggctgagttccattccattccatctcatcgcaacgttacgcaagcatcctccacctcctgccttgcctgcctgcctgcgtcgtagtttgcacaccgcaaccgtgttcttctctctctctctctctctctctccctctcgtccctgagaaagcgccgccgctctacgttcccctcgcttgcgctcggtccggcaaaggcccgtccttccatggccatcgcctcccgtgcaacgaagcgcgcgctgtccaccttcgccgccgccaagctcccggaggaggcggtcgcggccgcggccgccggcgaggcgatcgccgcccgctcccaccaggcggtgccgctgccaccggcgcccgcgtcgtccgtgaggccgctgcagttcgaggacaccggccgcctgttcgcgggggggccgacgtcggcgctgctgcgcacgctcgccgcgctgcaggcgctgtccgtgggcccgctcgtggacgccgccaccgcggcgctgcggtcgccggcggtggccggcagcgcgctgggccgcgccgcggccagggccacggcgtaccgccacttctgcgcgggcgagaccgccgacgaggccgcggccgtcgtgcgccgcctgtggcgcgggggcatgggcgggatcctcgactacgggatcgaggacgcggaggacggccacgcctgcgaccgcaacgccgccgggttcgtctccgccgtcgacgtcgccgcctcgctgcctccgggctcggcgagcgtgtgcatcaagatcacggcgctctgcccgatcgcgctgctggagaaggcgagcgacctgctgcggtggcagaagaagcacccgtcgttcagcctgccgtggaagacgcactccttcccggtgctgtctgactcgagcccgctccacctgaccgcgtcggagccggcggcgctgacggcggaggaggagagggagctgcagctggcgcactcgcggctgctggcggtgtgcgcgcggtgcgcggagcacggcatcccgctgctggtggacgcggagtacgcgacggtgcagccggccatcgactacttcacgctggtgggcgcgctggcgttcaacgacgccggcgcggcggacggcgggcgacccatcgtgcacggcaccatccaggcgtacctccgcgacgcgcgggaccggctggaggccatggtgcgcggcgcggagcgggagcgcgtgcgcctggggctcaaggtcgtgcgcggcgcgtacctgacccgcgaggcccggctcgcggccgcgctcggcgtgccgtcgcccgtgcacggcagcatccaggagacccacgactgctacaacggctgcgccgccttcctcctcgaccgcgtgcgccgcgggtccgcctccgtcatgctcgccacccacaacgtggagtcaggccaactcgcggcggcgcgtgcccaggagctggggatccccaagggagaccgcaacctgcaattcgcgcagctgatgggcatggcggacgggctgtcgctgagcctccgcaacgccgggttccaggtcagcaagtacctgccgtacgggccggtggagcagatcatcccctacctcatcaggcgcgccgaggagaacaggggcctcctctccgcctcctccttcgacaggcagctgctccggaaggagttggtgaggagggtcaaggccatggtggcgggacgtgagtgaagtgcttgtcgagcctgtgtgtgtggaggtcgaccgtgaagctgggactgggacaaggacgagctaaaggctagaagctgtaaatacacccttcaacggtcttcacattgatgtatccggggctttcttgaataataatcgaatgaatgaaatagtgttcgcgataaaaaaaaaaaaaaaa

SEQ ID NO: 4817 - DNA, 1760 bp, Zea mays
attgcatcctcctccacttcctgcctgcctgcctgcgtagctcgcacaccacaaccgccgcgttcttcttctctcgtccctaagcaagcgccgctgctcctcggttctttcgctcgatcccgcaaggcccgtccttccatggccatcgcctcccgtgccacgaagcgcgcgctgtccaccttcgccgcggccaagctcccggaggaggcgatcgccgccaccgccgcggtgccggtgccgctggcgcccgcgcccgcgtcgtccgagagggcgctgctgcagttcgaggacacggggcggctgttcgcgggggagccgacgccggcgctgctgcgcacgctcgccgcgctgcaggcgctgtccgtgggcccgctggtggacgcggccactgcggcgctgcggtcgccggcggtggccggcagcgcgctgggccgggccgccgccagggccacggcgtaccggcacttctgcgcgggcgagaccgccggcgaggccgcggcggccgtgcgccggctgtggcgcggcggcatgggcgggatcctcgactacgggatcgaggacgccgaggacggcggcgcgtgcgaccgtaacgccgccgggttcgcctccgccgtcgacgtcgccgccaagctgcctccgggctcggcgagcgtgtgcatcaagatcacggcgctgtgcccgatcgcgctgctggagaaggcgagcgacctgctgcggtggcagaagaggcacccgtcgctgaacctgccgtggaagacgcacgacttcccgatcctgtcggactcgagcccgctgcacctcacggcgtcggagccgccggcgctgtcggcggaggaggagagggagctggagctggcgcacgagcgggtgctggcggtgtgcgcgcggtgcgcggagcgcggcgtgccgctgctggtggacgcggagtacgcggcggtgcagccggcgatcgactacctcacgctcgccggcgcgctggcgtgcaacgccgagcgctccatcgtgcacggcacggtccaggcgtacctacgcgacgcgcgggagcggctggagaccatggcgcgcggcgtggagcgcgcgcgcgtgcgcctgggggtcaagctggtgcgcggcgcgtacctggcccgcgaggcccgggtcgcggccgccctcggcgtgccgtcgcccgtccacggcagcatccgggagacccacgactgctacaacggatgcgccgccttcctcctcgaccgcgtccgccgcgggtccgcctccgtcgtgctcgccacccacaatgtggagtcaggccaactcgcggcggcgcgtgctgaggagctggggatccccaggggagaccgcaacctgcagttcgcgcagctgatgggcatggcggacgggctgtcgctgggcctccgcaacgccgggttccaggtcagcaagtacctgccgtacgggccggtggagcagatcgtcccctacctcatcaggcgcgccgaggagaacaggggcctcctctccgcctcctccttcgacaggcagctgctccgggaggagttggtgaggaggttcaaggctgcggtgctgggacgtgagtgaagtgaacctgctgaggctactctgctgtgaagctgggacaagggccagttgaaggctagaagctgtaaatacacccttcaacagtcttcagacattgatgtatccggggctttcttgaataaatcgattgaatggaataatgaggcttatcgagtttaaaaaaaaaataaaaaaaaaaaaaaaaa

SEQ ID NO: 4818 - DNA, 1919 bp, Hordeum vulgare subsp. vulgare
ggatttccagctcacccgctggtatttcgtgttttttccatgccgtttcgcgaggcttcctcgctcgctcgctcgctcgctcgctctataagacccggctgccgcaccacacctgctccctccattctcggactctccctacaccttcgttcgttcccagcctctcacccagaccgttccgtttcttcactactgcgcagatcaacaacagcttcctctcttctcttcttccctctagctactcggctgattcctttgatccatcgtccgttcgttgcatcgtccggtcgcaagaaaagagcaggcagcgtctctttccattgctttctagcgacacctccggctccgaccttccatggccatcgcctcccgcatcacgaagcgcgcgctctccaccttcgccgccgcagccaagctcccggaggcggccgtcgcggccgccggcgccgacgcggtgcccgtgccttcgtccgcacagcagcagcagcagcaccaggtgctggagtttgaggacaccgggaggctcttcaccggggagccgtccacggctctggtgcgcacgctcgcggcgctgcagctcatgtccgcgggcccgctggtggacgtgggcatcgcggcgctgcggtctccggcggtggccgccagccccgtggtccaggccgcggcgcgggccacggcgtacaagcacttctgcgccggggagaccgccgatgaggccgcggcccgggtgcagcgcctctggcgcggcggcatgggcgggatcctcgactacggcatcgaggacgccgaggacggcgccgcctgcgaccgcaacgtcgccggcttcctcgccgccgtcgacgtcgccgccgcgctgccgccgggatcggcgagcgtgtgtattaaaatcacggcgctgtgcccgatcgcgttgctggagaagacgagcgacctgctgcggtggcagcacaagaacccgtcgctgcacctgccgtggaagcagcactccttcccgatcctgtccgactcgagcccgctgtacctgacgccgtcggagccggcggcgctgacggcggaggaggagcgcgagctgcagctggcgcacgaccggctgctggccgtgggcgcgcggtgcgcggagcacgacatcccgctgctggtggacgccgagtacgcgtcggtgcagccgtccatcgactacttcaccttcgtgggcgctctggcgtgcaacggcggcgggcggcccatcgtgcacggcaccgtgcaggcgtacctccgcgacgcgcgcgaccggctggacgccatggtgcgcgccgccgaggaggagcgcgtgtgcctcggcgtcaagatcgtccgcggagcctacctcaccagggaggcccggctggcggagtcgctgggcgtgccgtcgccgatccacggcagcatccaggacacccacgactgctacaacggctgcgcggccttcctcctggagcgcgtccgccgcgggtcggcctccgtgatgctggccacccacaacgtggagtccgggcagctggcggcggcgagggcgcaggagcttggcatcggcaagggcgaccggaacctgcagttcgcgcagctgatgggcatggcggacgggctgtccctggggctccgcaacgccgggttccaggtgagcaagtacctgccctacggccccgtggagcacatcatcccctacctcatccggcgggccgaggagaacagaggactgctctccgcttccgcgttcgacaggcagctgctccggaaggagctcgtcaggaggttcaagaacgcggtgatgggacgggagtgaagcgggcggccggccggccgggtgtccacgtaccggagagaagcgatggagttagaagttgtaaatatgcattgttgtatcgcgacctgaatgatgaatgaaataaacgaaataaccc

SEQ ID NO: 4819 - DNA, 1781 bp, Oryza sativa Japonica Group
gtcttgctagttttgcaccggagaaaaattcattgccttcttctgaatctcttcttcctccgaggagagcatttcttgctttggtttgtgttttcttgggtgtgtcaggcacaagtccgaccttccatggccatcgcctcccgcatccagaagcgcgtgcttgcctccttcgccgccgccgccgcagccaagctcccggaggcggccgtcgcggccgccggaggcgccgcagaggcggtggaggaggtcgcgtcttccgtgcaggagcaggtgcaggcgcagggagcgcaggtgttggagtttggggataccgagaggctgttcgccggggagaggtcgacgtcgctggtgcgcacgctcgccgtgctgcaggcgctgtcggtgggcccgctcgtggacgtggcgacggcggcgctgaggtcgccggcggtggccgggagcgcggcggggcgcgccgcggcgagggccaccgcgtaccagcacttctgcgccggggagaccgccgaggaggccgccgcggcggtgcgccgcctctggcgcggcggcatgggcgggatcctcgactacggcatcgaggacgccgaggacggccccgcctgcgaccgcaacgccgccggattcctcgccgccatcgacgtcgccgccgcgctgcctcctggctcggcgagcgtgtgcatcaagatcacggcgctgtgcccggtcgcgttgctggagaaggcgagtgatctgctgcggtggcagcagaagcacccggcgacgaagctgccatggaaagtgcacgggttcccggtgctgtgcgtctccagcccgctgtacctgacggcggcggagccgccggcgctggaggcggaggaggagagggagctcgagatggcgcacgggcggctgctggcgatcggcgagcggtgcgcggagtacgacatcccgctgctggtggacgccgagtacgccaccgtgcagccggcgatcgactacttcacgttcgccggcgcgctggcgttcaacggcggcgggaggcccatcgtgcacggcaccgtccaggcctacctccgcgacgcgcgcgaccggctggaggccatggcgcgagcggcgcagggcgagcgcgtgtgcctcgcgctcaagctggtccgcggcgcgtacctggcgcgcgaggcccgcctcgcggcctccctcggcgtgccgtcgccggtccaccgcagcatccaggacacccacgactgctacaacggctgcgccgcgttcctcctcgaccgcgtccgccgcggcgccgccgccgtgacgctcgccacgcacaacgtcgagtccgggcagctcgccgcggcgagggcgctggagctcggcatcggcggcggcggcgaccgcggcctgcagttcgcgcagctgatgggcatggcggatggcctctcgctcggcctccgcaacgccgggttccaggtgagcaagtacctgccgtacggtccagtggagcagatcatcccgtacctcatcagacgagcagaggagaacaggggattgctctcgtcttcctccttcgacagacagctgctccggaaggagcttgtgaggaggttcaaggctgcaatgctgggacgtgagtgaaagtgaggtggcagaagactgaggctgccttatctgtttgtgttgctactgggacttgggagtgaagcgatcgagtcatgagtagaagtcgtaaacttgtaaatactcctatcattctgaaaaaagaacagacattggtgtatcaatcgatagtgatctctgaataaactgaatcatcaacg

SEQ ID NO: 4820 - DNA, 1687 bp, Oryza sativa Japonica Group
tttggggataccgagaggctgttcgccggggagaggtcgacgtcgctggtgcgcacgctcgccgtgctgcaggcgctgtcggtgggcccgctcgtggacgtggcgacggcggcgctgaggtcgccggcggtggccgggagcgcggcggggcgcgccgcggcgagggccaccgcgtaccagcacttctgcgccggggagaccgccgaggaggccgccgcggcggtgcgccgcctctggcgcggcggcatgggcgggatcctcgactacggcatcgaggacgccgaggacggccccgcctgcgaccgcaacgccgccggattcctcgccgccatcgacgtcgccgccgcgctgcctcctggctcggtgagtcgccgccgccgccgcttaaccctcgccggtgtttctctctcctcgctgtcggcgtgcgtggctgtgggaccaggaggctgccacgtaggacggaatcttgcgcgagcggacccgcggattccttgggaatcttccggtagtaaactgccagtgaatcgcacggatgccactgcctcgtgggccctgaaaactagccacatgattccgacatgctctctccgccgctcgtttccattccacccgctttctcatcaaaaccctcctaataccatcaactaatcctttttttagacatctctaatcactcttaattacactcaacaacactacagaacgagattactacaccataattagcatagtgattaagctaagacagtatttgtgtggttgctgaattgctttgggatttttgcgtgttcgttgcaggcgagcgtgtgcatcaagatcacggcgctgtgcccggtcgcgttgctggagaaggcgagtgatctgctgcggtggcagcagaagcacccggcgacgaagctgccatggaaagtgcacgggttcccggtgctgtgcgtctccagcccgctgtacctgacggcggcggagccgccggcgctggaggcggaggaggagagggagctcgagatggcgcacgggcggctgctggcgatcggcgagcggtgcgcggagtacgacatcccgctgctggtggacgccgagtacgccaccgtgcagccggcgatcgactacttcacgttcgccggcgcgctggcgttcaacggcggcgggaggcccatcgtgcacggcaccgtccaggcctacctccgcgacgcgcgcgaccggctggaggccatggcgcgagcggcgcagggcgagcgcgtgtgcctcgcgctcaagctggtccgcggcgcgtacctggcgcgcgaggcccgcctcgcggcctccctcggcgtgccgtcgccggtccaccgcagcatccaggacacccacgactgctacaacggctgcgccgcgttcctcctcgaccgcgtccgccgcggcgccgccgccgtgacgctcgccacgcacaacgtcgagtccgggcagctcgccgcggcgagggcgctggagctcggcatcggcggcggcggcgaccgcggcctgcagttcgcgcagctgatgggcatggcggatggcctctcgctcggcctccgcaacgccgggttccaggtgagcaagtacctgccgtacggtccagtggagcagatcatcccgtacctcatcagacgagcagaggagaacaggggattgctctcgtcttcctccttcgacagacagctgctccggt

SEQ ID NO: 4821 - DNA, 1030 bp, Zea mays; identical to SEQ ID NO: 4805

SEQ ID NO: 4822 - DNA, 1116 bp, Zea mays; identical to SEQ ID NO: 1118

SEQ ID NO: 4823 - DNA, 1229 bp, Sorghum bicolor
gtctcttctcttcccccaatccccttgcctttgcttgcccattgtgattcaaagcaaccatggcaaccgcaatgtccccctccccctcggccgcaatcgctcgccccagccatcctcgctcctgtgctgctgcttcggtggccctccgctcgggcttcctgggccgcgggctggccgcggtggtgccggtggccgtggacgaccccagatgccgtctccgccgccgcgtctccttctccgtgcgcatggcctgggacgggcccctctcgtcggtgcgcctcatcatgcagggcaggaacgtgaagctgagcgacaagctcaaggagcacatcgaggacaaggtgggccgggcggtgtccaagcactgccacctggtccgggaggtggacgtgcgcctctccgcgcgcggcggcgagctcggccgcggacccaagacgtcgcgctgcgagatcacgctcttcagcaagcgccacggcgtcctgcgcgccgaggaggacgccgagtccacctacgccagcatcgacctcgccgccgccatcatcaagcgcaagctccgcaagatcaaggagaaggagacggaggtgcggcgcgacggcgacggtggtgcgggaggcgcctgggaagaggagctcccgctgctcgacgacgacctggtggaggccgacgaattggctgcggccgtgggcgcggaggacgagcagactgttgtcgccaaggtggtgcgcaccaaggtgttcgagatgccgccgctgacggtggaggaggcgctggagcagctggacaacgtgggccacaacttctactgcttcagggacgaggcaacgggccaggtcaacatcctctaccgcaggaaggaaggcggctacggcctcatcatccccaaggaggacggcaacttcgacaacaaggacaccgtcggcgttgcgcaaccaccaccacccgccgctccggagccgtccttggccgtgcacaccgccgccgacaacaactgatgatccttttctttttttttttgcttgcttgcttgctgctactgtaaaacaaactccacctagaactcgtcgacatctcatctccatcagttgcatgcattggcacattgctgtgtctgtgtctgtgtctgtgtcactctgtcacacacattactcacatagtattgctcaagtttaactctccttcatttcgtaccataccccgttcgttgtactggtggtattagtagcaattga

SEQ ID NO: 4824 - DNA, 1568 bp, Zea mays
agactgggacggagcttgttgagagacccgctgaaaagctcaaaccctcctcacttccacgcctctctcctccctttccacacttagctccccatgtcttctggaggaggagaccaccatggcgtctaccaccagcagcacggccacggccacggccatctcgcccgcgctgacggcgccgagtacgcgttccacggcaacgacgacatggagagcttcttcttcaaccatccggcgtcggcgggcctcgacggaggaggcagcaggacgactggcgccgacgagctcctggcgccgtactccagcatcacggactacctgcaggggctcctggacccctccgggctagctcggcacctcgacgccccgctcaagcacgagctgtctgtcgacgcgagccacgacagccagggcaccagcggcgcgcccggcggtgaagcggcggcgatgcacacgccgaactcgtcggtgtctctctcgtcgagcgaccgggacggggagggccagcagcctcgtcggtgcaagaagggcaggaccaacaaggcggaggacgcggagggggatgagaaagatcagcaggatggggagaattccaccaaagcgaacaaatccaagaagaaggctgagaagaggcagaggcagccgcgcgttgccttcctcaccaagagcgaggtggatcaccttgaggacggctatcggtggcgcaaatacggccagaaggcggtcaagaacagtccttacccaaggagctactaccggtgcactacgcccaagtgcggcgtgaagaagcgcgtggagcggtcgtaccaggacccgtcgacggtgatcacgacgtacgaggggcagcacacgcaccacagccccgccagcctgcgcgccggcggcgcgcacctcttcatgtccagcgcgcacgcgctgccgccgcacctgaccatgccgtcgtccagctttcgcccggacctgaacctgatgagcatgatgcaccccgccatggtgggcgcgaaccctaacatgttcctgccaagtatgcctcctcctcctcatatgtcaacgccatctcctgctcctgatcctcctcttcagcagcaccacttcactgactacgccctcttgcaagatctcttcccttccacaatgcccaataacccgtaataactaactgctacgaacagctagctagcctagatcgacatgagagatgctgtcgtcggaatactgcgcgccaaatgtgatcacctgatgacctcgtgcttgtgcgtgtgcttggtctaatggagaggggaacagttattattcattagtctgcttcatcttaaacttctgcctgcacctcttcctcttccatttgtcaactcgatcatatctccgctgcgcgggatggatggggaggtactagagatggaagtactttataactatcactagaacggcaacgcaatttatgtatgcgtatgcctctagacttcttgtacatgcatgtactagtgtatatcatgtgttcctcattgactcattggaggaaaaaatgaaagagtattctatttctccaaaaaaaaaaaaaaaaaaaa

SEQ ID NO: 4825 - DNA, 1086 bp, Sorghum bicolor
atgtcttctggtggaggaggaagcagtggcggaggaggagatcaccatggcgtctaccaccagcatggccacggccacctcgcccgtgccgatgccggcgccgagtacgtgttccacagcaacgacatggagagcttcttcttcaatcagccggcggcgtcggcgggcgtcgatggatcaggcagcagaactactggcgccgccgacgagctcatgccgccctactccagcatcacggactacctgcaggggttcctgcaggacccctccgggctagctcggcacctcgacgcgccgtgtcttcccgcggaggacgccccgctcaagcacgagctgtctgtcgatgtgagccacgacagccagggcaccagcggcgcgcccggaggagaaggggcggcgatgcacacgccgaactcgtcggtgtctctctcgtcaagcgaccgggagggggagggcggccagcagcctcgtcggtgcaagaagggcaggcccaaggcggaggatgcggagggggatgagaaagagcaggaagatggggagaattcctccaaagcgaacaaatccaagaagaaggctgagaagaggcagaggcagcctcgcgttgccttcctcaccaagagcgaggtggatcaccttgaggacggctaccggtggcgcaaatacggccagaaggccgtcaagaacagtccttacccaaggagctactaccgttgcacgacgcccaagtgcggcgtgaagaagcgcgtggagcggtcgtaccaggacccatcgacggtgatcacgacgtacgaggggcagcacacgcaccacagccccgccagcctccgcgccggcggcgcgcatctcttcatgtcaaacgcgcacggcgggctgccgccgcacctgatgccgtccagcttcggccgcccggacctgatgagcatgatgcaccccgccatgggcgcaaaccctagcatgttcctgccaagtatgcctcctcctcacatgtcaacaccatctcctgctcctcctcttcagcagcaccacttcactgactacgccctcttgcaagacctgttcccttccacaatgcccaacaacccataa

SEQ ID NO: 4826 - DNA, 1945 bp, Sorghum bicolor
ctagatctcgcaccggcggcagccagccatgtcgaagccctggggaggcgtcggcgcgtgggcgctggacgccgagcgcgccgaggaggaggagcgcgagcaggccctgtccttcccggcgcccgagccgcccgcggccgcgggcggcgccgccagcttcccgagcctccgcgaggcggccgccgcgggcgccgggggcaagtcgaagaagaacaagaacaagggaaccacgctgtcgctctccgagttcaccacctacggcgccgccgccgcccagcgccgcgcggcgcccgtcgagcccaggggcctgacccacgaggagatgatgatgctgcccacggggccccgggagcgctcggccgaggagctggaccgctcccgcggcttccgctcctacggcggcggcggcggcggcttcggcggccccggcggaggggagcgccgcggcggcttcgacgacgagggccgccgcgggccgggaagaagctcggatcttgacatgccctcccgcgccgacgaggctgacgactggggcgccactaagaagttcaccccggctcccgccgattcgggccgccgcgataggttcggcgggccttcccctctcggccgtgctgatgacattgacgactggtcgcgcgacaagaagccgctcccgtcgcgctaccccagcctcggttctggtggaggtggcttccgtgactcgccgggcttccgtgactcatcagctgcttctgatgctgaccgttgggtccgtggagccacccctatgccacacaacggccaggggtcgggggagaggccgcgcatcgtcctcaatcctcctcctaaacgtgacccggcggcagctgcctccaccccacctgctgaggtggcccgcaaccgcccaagcccgtttggggctgcaaggccccgggaggatgtgctggcagagaagggggtggactggaggaaggttgagaatgagattgagcagaagaccagccggcctaccagctcacactccagcaggccgaatagcgctcattcctcccgccctggaagccctgggtcgcaggtgtcggctgttgggagtgaaggagcaccgagggcacggccaaaggttaacccatttggtgatgccaagccaagagaattggtgttgcaggagaaagggaaagattggaggaagattgatcttgagctcgagcatcgtgctataaataggccagagtctgatgaagaaaaaaatttgaaagaagaaatcaaccttctgaaagtggatcttaaagaaattgagggaaagatgagtaatggttctgaccagacatcggtagatgcaaaagatttgtctgagaagatatctcagttggaaagccagcttgagcagctttcaagggagttggatgacaagattcgatttgggcaaaggccacgttctggtgcaggcagggttacaacacatgcaccaactagtttaggggaggaaccacaggctacagtggtggacagaccgcgttctcgcggtggtatggaaccacccccaaggcaggaagaaagatggggatttcaaggaagcagagaaaggggctcttttggtggaagcagaaattcggacaggccaatggcaagacagagatggtgaaattgggacaacaagcatctcatagggactcttctggttccagtcccttttttgtttgaaaagatgggcaaaataagtctgttttctatttgtcgtgtttgtttggtctagaagattgttgaggatggagataactccacatgaagttattggttgtcaagtctgtatgccgtaggatgttttacatttccctttttgccatcttccatgttaaaacaatatccggcacctccgatactaactgttattcatgcttactgaattccagttcagcttttgtcgaagtcgtttatttgtgcattgtaatggaagccttgaatt

SEQ ID NO: 4827 - DNA, 1899 bp, Zea mays
aacaagatcccctctcttcctcgcattcgcatcgcctcgattccacccacccacctccgtccgcctccgagcaccaccaaaccctagatctcgcaccggcggcagccatgtccaagccatggggcagcgtcggcgccggcgcgtgggcgctggacgccgagcgcgccgaggaggaagagcgcgagcaggccctgacctttccggcgctcgagccgcccttgcccgcgggcggcgccgccagcttcccgagcctccgggaggccgccgccgcgggcggcgggggcaagtcgaagaagaagaacaagggcaccacgctgtcgctgtccgagttcaccacctacggcgcggccgcggcccagcggcgcgcggcgcctgtcgagcccaagggcctgacccacgatgagatgctgctgttgcccacggggccccgggagcgctcggccgaggagctggaccgctcccgcgggttccgctcctacggcggcggcagcggcttcggcggccccgggggagagcgccgcagcggcttcgacgacgaggaccgccgcgggccgggcagaagctcggatcttgatatgccctcccgcgccgacgaggctgacgactggggcgccaccaagaagtttaccccggctcccacagactctggccgccgcgataggttcggcggcccttcccctctcggccgtgctgatgatattgacgactggtcgcgcggcaagaagccgctcccggcgcgctaccccagtctcgggtctggaggtggcttccgcgactctccagccttccgcgactcaccagctgcttctgattctgaccgttgggtccgtggcgccacccctttgccacacaacggcgagggggcgggggagagsccgcgcatcgtcctgaatcctcctaaacgtgatccgttagttgcctctaccccacctgctgaggtggcccgcaaccgaccaagcccgttcggggctgcaaggccccgggaggatgtgctggcggagaagggggtggactggaggaagtttgagaatgagattgagcacaagaccagccgtcctaccagttcgcactccagcaggccaaatagcgctcattcctcccgccctggtagccctgggtcgcaggtttcggcagttgggagtgaaggagcaccgagggcacggccaaaggttaacccatttggtgatgccaagccaagagaagtggtgctgcaggagaaagggaaggattggaggaagattgatattgagcttgaacatcgtgctataaataggccagagtctgatgaagaaagaaatttgaaagaagaaatcaaccttctgaaggtggatcttaaggaaatcgagagaaacatgagtaatggttctgaccagacatcggtagatgcaaaaggtttgtctgagaagatatctcagttggaaagccagcttgagcagctttcaagggagttggatgacaagattcgatttggacaaagaccacgttcgggtgcgggcagggttacagcacttgcaccaactagtttaggggaggaaccgcatgctacagtggtggacagaccgcgttctcgtggtggtatggagccaccaccaaggcaggaagaaagatggggatttcaaggaagcagagaaaggggctcttttggtgcaagcagaaattcggacaggccaatggcaaggcagagatggtgaaactgggacaacaagcatctcttagggatatttccggttcccagtcccttttttttgttctgaaaagatgggcaaaataagtcgttatttgtttgtcgtgtttgcttggtctagaagattgttgaggatggagataactccacatgaagttattggtttgtcaactctatgccgtaggatgttttgcgttccaaaaaaaaaaaaaaaa

SEQ ID NO: 4828 - DNA, 2059 bp, Oryza sativa Japonica Group
gaccagaagcgcaagcgactcctctctctctcacctccgctcgcctccgcgcctccgagcaccaaaccctagatctcgcggcggcggcggcgaccggggatggcgaagccctggggaggcgtcggcgcgtgggcgctggacgcggagcgcgccgaggaggaggagcgggagcaggcggcggcgttcccggcgcccgagccgcccgcggccgccggtggcgccgccagcttcccgagcctccgcgaggccgccgcggcggcgggcgggggcaagcagaagaagaagaacaagggcaccaccctgtcgctgtccgagttcagcgggtacggcgcgcaggggcagcgtcggggcggcggtggcgccgcccccgtggatccgagggggctcacccccgaggagatgatgatgctgcccaccggccccagggagcgctccgccgaggagctcgaccgctcccgagggttccgctcctacggcggagggtttggcgccggcggcggggaccgccgcggcgggttcgacgacgaccgccgcgggcccggtaggtcctcggatctcgacatgccctcccgcgccgacgaggcggacaactgggggacgaataagaggttcacgccggctctcggcgactctggccgccgtgataggttcggcggcccctccccagccggccgctccgatgacatcgatgactggtcgcgcgacaagaagccgatgccatcgcgctacccaagcctcggttctggtggtggtggtggtggcggcttccgtgaatcacctggtttccgcgactcaccaggcccctccgactctgaccgttggtctcgtggtggtagctttgcgccgatgccgcacaacggcgagcgtgagaggccgcggctcaaccttgatccaccgaagcgggatcccttggctactgctacgccaccagctgaggtggcacgcaaccggccaagcccatttggggctgcaaggccccgggaggaggtgctggctgagaaagggttggattggaggaagatggagaccgagattgaacagaaaactagccgccctaccagctcacagtccagccggccgaatagcgcacattcctcccgccctgggagccctggatcacaggtctcagcagttgggagtgaaggggcaccgaggtcacggccaaaggtaaatccgtttggtaatgccaagccacgggaagtggtgctgcaagagaaagggaaagactggaggaagatagaccttgagctggaacatcgtgccgttaataggccagagacgaatgaagaaaggatcttgaaagaagaaataaacctcctcaaggagaaactgaaagaaagtgaggccaataaaactgatggtccggaccaagcttcccctgaggatccagaggatttgtcggagaagataactcagatggaaaagcagcttgagttgcttactattgagttggatgacaaggttcgatttgggcaaagacctggttctggagctggcagggtttcagcagttccaccagctattgcagaggaaccacagattgtggtatccatcgtggataggccacgctctcgtggtggtatggagccatttccgaaaccagctgaggaaagatggggattccaaggtagcagagagaggggctcttttggtggaagcagaagttcagacaggccaatgacaaggcagaggtggtgagatacggcgtttgagcatttgttaaggaaactctgggtcctcgttttttgtttcgaaagaatggggaagaataagtcattttcttctgtgttttgactcccattttgtctgatctagaaagattggagagaagcttgtcaatggaggttactctgcgtgaagctatttattatcgcctcttaagttgtagggtattttggttccctttttgtcatctcccatgccaaaacaagacctggcaaactttgatactaactattgttcctgatcggttcatgtcgcatgtggtctcttaagcattcatggatggagaccttttgtatggatattttgatattttgtacagttgcatgtgttagcc

SEQ ID NO: 4829 - DNA, 2791 bp, Oryza sativa Japonica Group
ggcgaagccctggggaggcgtcggcgcgtgggcgctggacgcggagcgcgccgaggaggaggagcgggagcaggcggcggcgttcccggcgcccgagccgcccgcggccgccggtggcgccgccagcttcccgagcctccgcgaggccgccgcggcggcgggcgggggcaagcagaagaagaagaacaagggcaccaccctgtcgctgtccgagttcagcgggtacggcgcgcaggggcagcgtcggggcggcggtggcgccgcccccgtggatccgagggggctcacccccgaggagatgatgatgctgcccaccggccccagggagcgctccgccgaggagctcgaccgctcccgagggttccgctcctacggcggagggtttggcgccggcggcggggaccgccgcggcgggttcgacgacgaccgccgcgggcccggtaggtcctcggatctcgacatgccctcccgcgccgacgaggcggacaactgggggacgaataagaggttcacgccggctctcggcgactctggccgccgtgataggttcggcggcccctccccagccggccgctccgatgacatcgatgactggtcgcgcgacaagaagccgatgccatcgcgctacccaagcctcggttctggtggtggtggtggtggcggcttccgtgaatcacctggtttccgcgactcaccaggcccctccgactctgaccgttggtctcgtggtggtagctttgcgccgatgccgcacaacggcgagcgtgagaggccgcggctcaaccttgatccaccgaagcgggatcccttggctactgctacgccaccagctgaggtggcacgcaaccggccaagcccatttggggctgcaaggccccgggaggaggtgctggctgagaaagggttggattggaggaagatggagaccgagattgaacagaaaactagccgccctaccagctcacagtccagccggccgaatagcgcacattcctcccgccctgggagccctggatcacaggtctcagcagttgggagtgaaggggcaccgaggtcacggccaaaggtaaatccgtttggtaatgccaagccacgggaagtggtgctgcaagagaaagggaaagactggaggaagatagaccttgagctggaacatcgtgccgttaataggtatgtatatgaagtcacctcttgattgcacttggcatttctcatgaatctcatgatactgcaaacatgcaatgcaagtgtactgatatagcttagcgaaggtgtatttcttgtggtaatggaaacatgcaatactggaggactgatataggttagtaaaaggagtgcttcttgtgataatgtaaaacatgcgtattgcaatactggagtattggtataggttagtaaaggtgcaggcgtgcagccttgcataaagaattgtgcaagttctgcttagttcttttctaatatataaaaaacctagcaatttacgtagcatgtcctaacaataattgccctgctgtttttgttatgtaatattttggaagaattgcttttgtgataacttcataattgaaatccaaaaaatgagcaactagaagtgaaggtttacctttatagtatacttcagtgaattaagcatttaatgttaatgtcgaaccatttattgttatgaagttatctgcattaatcctttgaacggtgcagtggagtcaacaatcaacatttacagcaattgttcagttaaattcaatcttctcttgtgggtgctgaatgtagtgatgcatatgcagttatatgttgtcacttccattcaaacttgattgttcaccgttacgcttagttttgtgggaagtgaaattaactggggtcgctagcaaaatgtagcatgctattgtgttgataaagacataatttgcttttataagtcatcactcatggatggcaaggacatggatacttggattggttccttctgaaattctgttcttttagccagtgcaggtttgttttctattaattcaatatatctgtacctcatttttcaggccagagacgaatgaagaaaggatcttgaaagaagaaataaacctcctcaaggagaaactgaaagaaagtgaggccaataaaactgatggtccggaccaagcttcccctgaggatccagaggatttgtcggagaagataactcagatggaaaagcagcttgagttgcttactattgagttggatgacaaggttcgatttgggcaaagacctggttctggagctggcagggtttcagcagttccaccagctattgcagaggaaccacagattgtggtatccatcgtggataggccacgctctcgtggtggtatggagccatttccgaaaccagctgaggaaagatggggattccaaggtagcagagagaggggctcttttggtggaagcagaagttcagacaggttcgtgcaattcttgctcaatttctttccaggttaatgtttcctattgacagttgcatgtaatttgctggttagctgaaatgcctccttaatccttctatatagtttaattctttttgtaaatgtatgatgcatcacactttcatattgacgttaatttttcatgcctgccttgttgtgtttgtcatgtttagttgaatacggaaccttttatatagttattcttcttgtatggtgatataccatgttttgattataagccaagtagcacttcaactttggacaggtttgagattgaacgtatagtatactgttcgattgaagatgagagttggaatgggatatttgtc

SEQ ID NO: 4830 - DNA, 4795 bp, Triticum aestivum
ggatccgagcttcgttcatctttgttcgtgtatcgacaggttggagccgaggccttagcacgacggtttttccgactgtctgctataacaaggtttgcgtgactccggtgatggaggggtgacgacggcggcgcgccttcagctcgctccagtgctcaagtcgttgctaggtgatctacggatttggatgcaatttttacttatgatgtttgttatactaccttgatagttgatgaatagtagaccaggtttaaaaaaaacttggtatatagtaatcagtttgtctaattcacatctagatggttttaaggatgtcacatctaagctctcacaaatatacaatgcagagtggaccactctgttgtggtctattttttttgttctattttttttgtttcttgttgctacattatatacttgtgggagcttaaacgtgacatccttaaaaaaacatctagatgtgaattagataaattgatagtaataagtaattttaaaatttatatacggaaatcacgagatttttcagattacgcattggacactttttacgtagttttttccttgccgtatacagacaggagagagcagaggaaagccgagtttgatctgacggcggagtcacgaccgtccacgagtgggtcacgacggcgtcccgtcagaatcaaaagcacagccaacccccagcgcagacccacccaacccaacaacgcaccccaaacgaatcgcccctcgattgttcgctcccgagcaccgacccaaccctagatctcgcagcagcagcgcgaagccgacgccatggccaagccctggggcggcgtcggcgcctgggcgctcgacgctgagcgcgaggacgaggagcgcgagcacgccgcggccttccccgcgcccgacccgcccgccgccgcgggcggcgccgccagcttccccagcctcaaggaggccgtcgtcgccggcggcggcaagcagaagaagaagaagggcaccaccctctcgctctccgagttcaccacctacggcgcggccggcgcgcctcgccgcgtcgcccccgccgagcccaagggcctcaccccgcaggagatgatgatgctccccaccggcccgagggagcgctcggaggacgagctggaccgatcccgcgggttccgctcctatggcggcgacagggagccgcgcggtggcggattcgacgacgaccgccggtccagcagggattcggatctcgacatgccctcccgcgccgacgagtcggacaactggggcaagaacaagagtttctcgccggctcccaccgactctggccggcgtgataggctcagtggcccgtctccgctcggccgctctgatgacatcgacaactggtcgcgcgacaagaagccactcccgtcgcgctaccccagccttggaaccggcggcggtttccgtgaatcatctggcggtggtttccgtgaatcatctggtggtggtttccgcgaatcatctggtggtggtttccgtgactcaccggggccatctgactctgatcgctgggtccgtggtgctgtccctgcccctatgaccaacaatggtgataggccgcgcctcaacctcaatccaccaaagcgtgatccctcagccactcctgtgccagctgctgaggtcgcacgcagcagaccaagccccttcggggctgctaagccccgtgaggaggtgctggctgagaagggccttgattggaggaagatggagggggagattgagaaaaaaaccagtcggcctactagctcgcactccagtaggccgaacagcgcacattcctcccgccctggaagccctggatcacaggtctccgcagttgggagtgagggagcaccaagagcacggccaaaggtaaatccattcggtgatgccaaaccacgggaagtggtgctgcaggagaaaggaaaagactggaggaaaattgaccttgagctggagcatcgggcagttaataggtatgttatatattagcctgcctcttgacagcatgtagtgtttcttttgataatgtataactggaagtgcagacatgataggttaagaatgttacaaacttgcgcaaaagaaataattttgctaagtaacaactggctggcctttggcatatctgattatgcttgctgtaagttatctgaattggcgtagtgttgaaatttgcaagaatgctatggctaaaataatctcgttggcacttgtttgcctaggcgattgcatttaagctattcagtgttggcacttccttgttgatatgaaagtatgtaagcaactgagcgagggttgtagggaatgccgtcatattctgcaagtatagcatgccttttggcaaaaaaaatcgtcattgttttttgaagtcatgacccatggatagcaagatcatgaatgttaagtcacatattttagtcattgttttttgaagtcatgacccatggatagcagggtcatgaatgttaaatcacatattttgttttagtcatgttttctttcttttgcatacaaaatgctgcattatgtaaatgtgagaaaaaggctcccgaaatattcttgtcttgctaatttgctagcatcctgtgacctgagttattttatttatttatttcattttgtaatatgtatagtattctactttagacataaaatttgataataaccacatcaaacaaggttgcgagtaaattttatacagttttctagctaattaactactcactctgatccatattttgaggaagtataatttgaataacagagaatgtgttttttgttaatttttttgtgggccttctattttggccgagtacttaagtagctttatgcacaatgtggcaaaatgttgcataattttgttcatgtgctccgctagggacagcgttgcttttgttctttgtaattagggcatttgtttttgtctccttttcggtctttgtgttaataatctgaattcaaatcattttagctggacttgttattgctttatttgctacattgtaaagagtattgctttatttgctacattgtaaagagtttaatcaatgtttatttttatcttaggactcgtgattgtgttaacatggctgtgaaggaagcttaactagaaatgaacacttagatgtattcttagcttgattttgtactatttagtttcaacctatgatgattcactattgtcttgctttgtgatacgctgatctctcgacatgatggttgaatcattaatcattttgagacatgcacttttcgttaaattctgggcttgatatatgaataaatggaccctgtctgattccacctttctcacattcgtggttgactcttgtcgtttttataataaatgaggaaactactcatacagatatttatagcagcactcttaatatttaacccgacactctgatgaattaaatgaactgctttggtagtgaatacttcatccagtcaaatggatatgtttgtaatttgctgttccttttccttgagaggcctattcttctagcttctaggtgctgctgtttgcttgaaccataccttttctgtgaaaagtctatttttttagcttctaggtgtttacttgaatcctatttttcaggccggagtcagaagaagagaagaatttgaaagaagaaatcaaccttctcaaggtggacttgaaggaaattgaggccattgcaggtgatggttctgagcaagcaaaagaagtgtctgagaagatatctcagatggaaaagcagcttgatctgcttacagttgagttggatgacaaaattcgatttgggcaaagacctagttctggagctggaagggctgcagcatttccacccgctagtgaggaaccacatgttgcagtggcccacatggacagaccgcgttcccgtggtggtgtggaaacatatccgaaaccagttgaagaaaggtggggatttcatggtagcagggaaagaggctcttttggtggaggcggaagttcagacaggtttgtgcagtttctttgctaagttcgatcatgcatgttttccagagttcagacaggtcttgtagtatgatggatgtagatcttatgctcttttatgttatttccaccatgtttagctgaatactggatcattcaggtagtgatttcgctaggtataaaaatagcatatatatcatgtttcaaggcaatagaactttgattccaaccgcttttagattgtgtgctaagtatgctgctatatattatgttcaagacaaatagaactttgatacccgctgcttctgggtcatcatggtaatcaactaggcatggcagctctcattgtaccataatctgctgtatttaagtagaaagagttatgctgcaaatcacactctctttcaagcattacatttgatgtcgtcatttaggtagtgcactcatcttattgtttacttggtctttctttttcaggtcatcaacaaggcagggatggtgaagaggagtttgaagaatcaactgtcaaggaaacttctgatcgctgtcgtttttggggttttgaaagtgggaaagaataagtcatttaatttttgtcgtgcttgactctcattttgttcgaggtagaagattggagttaatctttgtcaacaaaggtttactccgcgtgaagcttttggttaccacctttgctgtaggtttctttttgcttctttcttttgccatttcgtgtcaaaacaaaacttgtcaaaaaattatgctaactgactattgctcttgagtcatggatcgagtcgactccctttagtgagggttaattgagctcgcggccgc

SEQ ID NO: 4831 - DNA, 1941 bp, Hordeum vulgare subsp. vulgare
gagatctcgccagcagcagcgcgaagccgacgccatggccaagccctggggcggcgtcggcgcctgggcgctcgacgctgagcgcgaggacgaggagcgcgagcacgccgcgtccttccccgcgcccgacccgcccgccgccgcgggcggcgccgccagcttccccagcctcaaggaggccgtcgtcgccggcggcggcaagcagaagaagaagaagggcaccaccctctccctctcggagttcaccacctatggggccgccggcgcgcctcgccgcgccgcccccgctgagcccaagggcctcaccccgcaggagatgatgatgctccccaccggcccaagggagcgctccgaggaagagcaggaccgatcccgcgggttccgctcctatggcggcgacagggagcgcggcggcggattcgacgacgaacgccggcccagcagggattcggatctcgatatgcgctcccgcgccgacgagtcggacgactggggcaagaacaagagtttctcgccggctcctaccgactctggccggcgtgatagactcagtggcgcgtctccgctcggccgctcagatgacatagacaactggtcgcgcgacaagaagccactcccgtcgcgctaccctagccttggaaccggcggtggtttccgtgaatcaccaggcggtggtttccgcgaatcatctggtggtggtttccgcgaatcatctggtggtggtttccgagaatcatctggtggcggtttccgtgactcaccagggccatctgactctgatcgctgggtccgcggtggcgtctctgcccctactatgaccaacaatggtgataggccgcgcctcaacctcaatccaccaaaacgtgatccctcagcggctgctgtgccagctgctgaggtcacacgtagcagaccaagccccttcggagctgcaaagccccgtgaggaggtgctggctgagaagggccttgattggaggaagatggagggtgacattgagaagaaaaccagtcggcctactagctcgcactccagtaggccgaacagcgcacattcctcccgccctgggagccctggatcacaggtctctgcagttgggagtgagggagcaccaagagcacggccaaaggtaaatccattcggtgatgccaagccacgggaagtggtgttgcaggagaaaggaaaagactggaggaaaattgaccttgagctggagcatcgttcaattaataggccggagtcagaagaagagaagaatttgaaagaagaaatcaaccttctcaaggtggacttgaaggaaattgaggccattgtaggtgatggttctgagcaagcaaaagaagtgtctgagaagatatctcagatggaaaagcagcttgatctgcttacagttgagttggatgacaaaattcgatttgggcaaagacctagttctggagcgggcagggttgcagcatttccaccagctggtgaggaaccacatgttgcagttgcccacatggacagacctcgttcccgtggtggtgtggaaacatatccaaaaccagttgaagaaaggtggggatttcatggtagcagagaaagaggctcttttggtggaggcggaggttcagacaggtcatcagcaaggcagggatggtgaagaggagtttgaagaatcaaccgtcaaaggaaacttctggtcgccgtcctttttgggattttgaaagtgggaaagaggattttgaaagtgggaaagaataagtcatttaatttttgtcgtgcttgactctcattttgttctgaggtagaagattggagataacctttgtcaacaaaggttttctccgcgtgaagctattggttaccaccttcgctgtaggtttctttttgcttctttcttttgccgttccgtgtcaaaacaagacctgtcaaatatttatgctaactgactattgctct

SEQ ID NO: 4832 - DNA, 1713 bp, Zea mays; identical to SEQ ID NO: 1119

SEQ ID NO: 4833 - DNA, 3567 bp, Zea mays; identical to SEQ ID NO: 1120

SEQ ID NO: 4834 - DNA, 3492 bp, Oryza sativa Japonica Group
tggctactctctcctctcttctcctctgaaccttccacactgaaaacccagctgccttccttttatctgaagagttgttcagaggcttatctagcttcagttgatttcctgctgctccattggttcttgctcttgttcttgctgctgctgcttttgctctttgtgtgttcatgtgaggagaaggattggaagaagggaagtgaagcagagattgggaagagcaggtttggtcaagaaggaagaacagagtgggagtttcaggagaagctgagagacaccaggacaacactgaaacaccaatgtgaatatgtgatcaagctgctgccatcagatttcccaacacaaacaatccatagcaatgagaaggcacatccttgtgatctgcctccctctaatcacactcctctcactctccatcagctcaagctgccaatctgaccaccaaattcagacccaagcacttctccagttcaaggccggcttgaccgaccctctcaacaatctccagacatggaccaacaccacctcgccgtgccgcttcctcggcgtccggtgcgaccggaggaccggcgccatcacgggcgtctcgctgtcgagcatgaacctctccgggaggatatcgccggcgatcgccgcgctgacgaccctgacacgccttgagctcgactccaactcgctgtcggggagcgtgccagccgagctgagcagctgcacccggctcaggtttctgaacctctcctgcaacggcctcgccggcgagctgccggacctgtcggcgctggcggcgctcgacaccatcgacgtcgcgaacaacgacctctccgggaggttcccggcgtgggtcggcaacctctccggcctcgtcacgctcagcgtcgggatgaacagctacgatcccggggagacgccggcgagcatcgggaacctcaagaacttgacgtatctgtacttggcgagctcgaatctgagaggggtgatacctgaatccatcttcgagctcgccgcgctggagacgctcgacatgtcgatgaacaacctcgccggcgtgatcccggcggcgatcggcaacctccggcagctgtggaagatcgagctgtacgggaacaacctcaccggcgagctcccgccggagctcgggaggctgaccgggctgcgggagatcgacgtgtcccggaaccagctctccggcgggatcccgccggagctcgcggcgctcgaggggttcgaggtgatacagctctaccggaacaacctctccgggcagatcccggcggcgtggggcgagctgaggtcgctgaagagcttctccgcctacgagaaccgcttctccggcgagttcccggcgaacttcggccggttctcgccgctcaacagcgtcgacatctccgagaacgccttctccgggccgttcccgaggcacctctgcgacggcaagaatctccagtaccttctcgccctccagaacggcttctccggcgagctccccgacgagtactcgtcgtgcgacagcttgcagaggtttcggatcaacaagaacaagctcaccggcagcctcccggcggggttgtggggtctccccgccgtgacgatcattgacgtgtcggataatgggttcaccggaagcatctcgccggcgatcggcgacgcgcagagcttgaaccagctgtggctgcagaacaaccatctcgacggcgagatcccgccggagatcgggcggctcgggcagcttcagaagctgtacctgtcgaacaactcgttctccggcgagataccgccggagatcgggagcctgtcgcagctgacggcgctgcacctggaggagaacgcgctcaccggccggctccccggcgagatcggcggctgcgcgcgtctcgtcgagatcgacgtctcccggaacgcgctcacgggcccgatcccggcgacgctgtcggcgctgtcgtcgctcaactcgctgaacctgtcgcacaacgcgatcaccggcgcgatcccggcgcagctggtggtgctcaagctgagctccgtcgacttctcgtcgaaccggctcaccgggaacgtgccgccggcgctgctcgtgatcgacggcgacgtggcgttcgcgggcaacccggggctctgcgtcggcggcaggtcggagctcggcgtgtgcaaggtggaggacggccgccgcgacgggctcgcgcggaggtcgctcgtcctcgtgccggtgctcgtgtcggcgacgctgctgctcgtcgtcggcatcctgttcgtcagctaccggagcttcaagctggaggagctcaagaagagggacatggagcagggcggcgggtgcggcgcggagtggaagctggagtcgttccacccgccggagctcgacgccgacgagatatgcgccgtcggggaggagaacctgatcgggtcgggcggcacggggcgcgtgtaccgcctcgcgctcaagggcggcggcggcacggtggtggcggtgaagcggctgtggaagggcgacgcggcgagggtaatggccgcggagatggccatcctcggcaagatccggcaccggaacatcctcaagctccacgcctgcctctcccgcggcgagctcaacttcatcgtctacgagtacatgccgcgcggcaacctgtaccaggcgctccggcgagaggccaagggcggcggatgcggcgccgccgccgccgagctggactgggctcgccggtgcaagatcgcgctcggcgcggccaaggggctcatgtacctccaccacgactgcacgccggcgatcatccaccgcgacatcaagtccaccaacatcctcctcgacgacgactacgaggccaagatcgccgacttcggcatcgccaagatcgccgccgaggactccgccgagttcagctgcttcgccggaacccacggctacctcgcccccgagctcgcctactccatgaaggtgacggagaagacggacgtgtacagcttcggcgtcgtgctgctggagctcgtcaccggccggagcccgatcgacccggcgttcggcgaggggaaggacatcgtgttctggctgtcaaccaagctcgccgcggagagcatcgacgacgtgctggacccgcgcgtggcggcgccgtcgccgtcgtcgtcgtcggcggcggcggctgccagggacagggaggacatgatcaaggtgctcaaggtcgccgtgctctgcaccgccaagctgccggcggggcggccgacgatgagggacgtggtgaagatgctcaccgacgccggcgccgggccgtgcagcccccgcggccagccgccggcggcgagggcttgcgccaggagcaagagctgctgctgaattttagagtagattctgctttctcgcctctgtctgcatctgcatttctgcagccaactctcgctgaattttaatctttgatgtgtactagggatcatactgtagatgataatgcatttgcaggtattatgtaaaatggttgacaattaaggtagtagtccactttaatt

SEQ ID NO: 4835 - DNA, 3437 bp, Hordeum vulgare subsp. vulgare
ggcgctccctccctccctctcctgtcctgtccgtctcagcttctcctctgatcttccttcatcgcggccgagcttcctgagttcttgctcctttgggtgtctgctttccgtttgatgagaattcttggagggcggggacaagagacgaaagaaggcgaagttcggttcagcgatgcgtgcgggcagagtgggatcgagttgatgaggtatctgagaggtgttctaaagcaagcttcagggcaatactaattacccatgtgatcagttctttctggatttgtcaataccaatccttgcaatgagaaaacacatcctattctgcctgcagcttaccatactcgtttccctctctgtgaactcaacctgccaaactgatccccaaacagaggcactcctccaattcaaggccagtttagctgaccctttgaactatcttcagacatggacaaaagccacgcccccgtgccagtttctcggcgtccggtgcaacgcaggcttggtgactgagatctcgctgtcgagcatgaacctctccggcacgatctcgccgtcaatcgccgcgctccgcggcctggagcggctcgatctggacaccaattcgttgtcaggaactgtaccttctgagctgatcagctgcacccagctccggttcctgaacatttcatggaacaccctgaccggagagctgccggatttttcggccctgacggtgctagagagcctcgacgtcgcgaacaatggcttctcgggccggtttccggcgtgggtgggcgacatgaccggcctggtgtacctcagcatgggctgcaacaactacgatcaaggggagatgcctccgagcattgggaacctcaagaacctgacgtatctgtacctgtcgaactgcagcttgagaggggcgatacccgactccgtcttcgagctgaccctgctggagacgctggatttgtccttgaacaatctcgccggcgagatcccgagggccatcggcaacctcaggaaagtgtggaagatcgagctgtacaagaacagcctcaccggcgagctcccgccggagcttggcaggctcgcggagctgcgggagatcgacgcctcccgtaaccagctcagcggcggcatcccggcagcatttgccaagctcaagaacttgcaggtgatccagctctaccggaacaacctgtccggggcgatcccggctgagtgggccgagctcaggtccctgaagagcttctccgtctacgagaaccgtttcgccggcgagttcccggccaacttcggccggttctcgtcgctcggcagcgtggacatctccgagaacggcttcaccgggccgttcccgaggcacctctgcaacggcaagagcctgcagttccttctcgccctgcagaacggcttctccggcgaggtcccggaggagtactccgcgtgcaaaaccctccaaaggttccggatcaacaagaaccagctcaccggcagcatcccggagaggctgtgggggctccccgccgtgacgatcatcgacgtatcggacaatgggttcaccgggaccatatcgccgctgatcggcgaggcgcagaatctgaaccagctctgggtgcagaacaacaggctcagtggcacgatcccggcggaaaccggccggctcgggcagctccagaagctctacctgtccaacaattctttctcggggacaataccgtcgcagattgggaacctggcacagctgacggcgctgcacctggaagacaacgcactgggtggcgcattgcccgccgatataggcggctgctccaggctcgtcgagatcgacgtctcccggaacgagctcacggggccgatccccgcctcgctgtcgctgctgtcgtctctcaactcactcaacatgtcacgcaacgccatcaccgggatgatcccggcccagcttcaggcgctgaagctgagctccgtcgacttctcggcgaaccggcttaccggcagcgtgccgcccgggctgctcgtgatcgccggcgacgaggcgttcgccgggaatcccggtctctgcgtccatggctggtctgagctcggcgcgtgcaatacggacgaccaccacagggacggcctcgcgaggagatcgcttgtcgtcttgccggtcattgtgtcggtcatggtgctgcttgtggttggcatactgttcgtcagctacagaagcttcaagctcgaggagcagaggaggagggacctggagcacggcgacgggtgcgagcagtggaagctggagtcgttccacccgccggagctcgacgcagacgagatatgcggcgtcggggaggagaacctcgtcgggtcgggcggcacggggcgcgtgtaccggctgcagctcaaggacggcggcggcactgtggccgtgaagcggctgtggaagggcgacgccgcgcgggtcatggccgcggagatgtccatcctcggtacgatccggcaccggaatgtactcaagctacacgcctgcctgtcgcgcggcgagctcaacttcatcgtctacgagtatatgccgcggggcaacctgtaccaggccctacgccgggaggccaagggcggcggcggcgaacccgagctggactggccgcggcggtgcaaggtcgcgctcggcgccgccaaggggctcatgtaccttcaccacgactgcacaccggcggtcatccaccgcgacatcaagtccaccaacatacttctcgatgaggactacgaggccaagatcgccgacttcggcatcgccagagtcgccgccaagaactccgaggagttcagctgcttcgccggaacccacggctacctcgctcccgagctcgcctactccctcaaggtgacggagaagacggacgtgtacagcttcggcgtcgtgctgatggagctggtcaccggccggagcccgatcgacgctcgcttcggcgagggcaaggacatcgtgttctggctgtcgagcaagctcggcacgcagagaatggacgacgtcgtggacccgcgcctcgcagcgtcgtccgccaagggcaaggaggagatgctcaaggtgctcaggatcgccatgctctgcacaaccaagctgccggccgggcggccggcaatgagggacgtggtgaacatgctcacggacgcctgcgcggggtcatgtagcccgcgcggtcacccgccagtgtggagctgcagcaaaagcgcctgctgaattttagagtagactctgactcctgcgtaccaccgtcttatctctgtttttgtaagcaaaatactgacgtgatctttgtggtgtattagtcggatcatttatgtttgcaggtatattgtaaagtgtttacgatcatattttgggtgcatattgaaatgttttagactggatccactgtaggggatgggttggaaggaacacacgtaaggtctgtttgccgatatattaaccagttcacagc

SEQ ID NO: 4836 - DNA, 3331 bp, Hordeum vulgare subsp. vulgare
gagcgctccctccctccctctcctgtcctgtccgtctcagcttctcctctgatcttccttcatcgcggccgagcttcctgagttcttgctcctttgggtgtctgctttccgtttgatgagaattcttggagggcggggacaagagacgaaagaaggcgaagttcggttcagcgatgcgtgcgggcagagtgggatcgagttgatgaggtatctgagaggtgttctaaagcaagcttcagggcaatactaattacccatgtgatcagttctttctggatttgtcaataccaatccttgcaatgagaaaacacatcctattctgcctgcagcttaccatactcgtttccctctctgtgaactcaacctgccaaactgatccccaaacagaggcactcctccaattcaaggccagtttagctgaccctttgaactatcttcagacatggacaaaagccacgcccccgtgccagtttctcggcgtccggtgcaacgcaggcttggtgactgagatctcgctgtcgagcatgaacctctccggcacgatctcgccgtcaatcgccgcgctccgcggcctggagcggctcgatctggacaccaattcgttgtcaggaactgtaccttctgagctgatcagctgcacccagctccggttcctgaacatttcatggaacaccctgaccggagagctgccggatttttcggccctgacggtgctagagagcctcgacgtcgcgaacaatggcttctcgggccggtttccggcgtgggtgggcgacatgaccggcctggtgtacctcagcatgggctgcaacaactacgatcaaggggagatgcctccgagcattgggaacctcaagaacctgacgtatctgtacctgtcgaactgcagcttgagaggggcgatacccgactccgtcttcgagctgaccctgctggagacgctggatttgtccttgaacaatctcgccggcgagatcccgagggccatcggcaacctcaggaaagtgtggaagatcgagctgtacaagaacagcctcaccggcgagctcccgccggagcttggcaggctcgcggagctgcgggagatcgacgcctcccgtaaccagctcagcggcggcatcccggcagcatttgccaagctcaagaacttgcaggtgatccagctctaccggaacaacctgtccggggcgatcccggctgagtgggccgagctcaggtccctgaagagcttctccgtctacgagaaccgtttcgccggcgagttcccggccaacttcggccggttctcgtcgctcggcagcgtggacatctccgagaacggcttcaccgggccgttcccgaggcacctctgcaacggcaagagcctgcagttccttctcgccctgcagaacggcttctccggcgaggtcccggaggagtactccgcgtgcaaaaccctccaaaggttccggatcaacaagaaccagctcaccggcagcatcccggagaggctgtgggggctccccgccgtgacgatcatcgacgtatcggacaatgggttcaccgggaccatatcgccgctgatcggcgaggcgcagaatctgaaccagctctgggtgcagaacaacaggctcagtggcacgatcccggcggaaaccggccggctcgggcagctccagaagctctacctgtccaacaattctttctcggggacaataccgtcgcagattgggaacctggcacagctgacggcgctgcacctggaagacaacgcactgggtggcgcattgcccgccgatataggcggctgctccaggctcgtcgaggtcgacgtctcccggaacgagctcacggggccgatccccgcctcgctgtcgctgctgtcgtctctcaactcactcaacatgtcacgcaacgccatcaccgggatgatcccggcccagcttcaggcgctgaagctgagctccgtcgacttctcggcgaaccggcttaccggcagcgtgccgcccgggctgctcgtgatcgccggcgacgaggcgttcgccgggaatcccggtctctgcgtccatggctggtctgagctcggcgcgtgcaatacggacgaccaccacagggacggcctcgcgaggagatcgcttgtcgtcttgccggtcattgtgtcggtcatggtgctgcttgtggttggcatactgttcgtcagctacagaagcttcaagctcgaggagcagaggaggagggacctggagcacggcgacgggtgcgagcagtggaagctggagtcgttccacccgccggagctcgacgcagacgagatatgcggcgtcggggaggagaacctcgtcgggtcgggcggcacggggcgcgtgtaccggctgcagctcaaggacggcggcggcactgtggccgtgaagcggctgtggaagggcgacgccgcgcgggtcatggccgcggagatgtccatcctcggtacgatccggcaccggaatgtactcaagctacacgcctgcctgtcgcgcggcgagctcaacttcatcgtctacgagtatatgccgcggggcaacctgtaccaggccctacgccgggaggccaagggcggcggcggcgaacccgagctggactggccgcggcggtgcaaggtcgcgctcggcgccgccaaggggctcatgtaccttcaccacgactgcacaccggcggtcatccaccgcgacatcaagtccaccaacatacttctcgatgaggactacgaggccaagatcgccgacttcggcatcgccagagtcgccgccaagaactccgaggagttcagctgcttcgccggaacccacggctacctcgctcccgagctcgcctactccctcaaggtgacggagaagacggacgtgtacagcttcggcgtcgtgctgatggagctggtcaccggccggagcccgatcgacgctcgcttcggcgagggcaaggacatcgtgttctggctgtcgagcaagctcggcacgcagagaatggacgacgtcgtggacccgcgcctcgcagcgtcgtccgccaagggcaaggaggagatgctcaaggtgctcaggatcgccatgctctgcacaaccaagctgccggccgggcggccggcaatgagggacgtggtgaacatgctcacggacgcctgcgcggggtcatgtagcccgcgcggtcacccgccggtgtggagctgcagcaaaagcgcctgctgaattttagagtagactctgactcctgcgtaccaccgtcttatctctgtttttgtaagcaaaatactgacgtgatctttgtggtgtattagtcggatcatttatgtttgcaggtatattgtaaagtgtttacgatc

SEQ ID NO: 4837 - DNA, 2625 bp, Zea mays; identical to SEQ ID NO: 1121

SEQ ID NO: 4838 - DNA, 2364 bp, Sorghum bicolor
atggcgaccaccatcaccaggctcttgcaccacctagcactcttcctcctccttgtccagttcgccgacgcagtcctcaccccaaagaccaagaaccacgctgcgctgaagcctcagtcaacaacgagcaccacctacatcgtccatgccaacgacctcgccaagccgccccacttccgctccctggaggactggtaccgttccatggtgtccacccacgcgtcttccactcgggcggcgagctccagcggcatcctgtacacctacgacaccgtcatgcacggcttcgccgtccagctcactggcgacgaggcccggctcatgtccagcgcgcccggcgtcatcggcgtgtacgagaacagggtgctctaccctcagaccacgaggtcgccggggttcatgggcctcgaacccggcaatggcgcctggaagcagaccgacttcggtgacggcgtcatcatcggcatcatcgacggcggcatatggcccgagagcgcgagcttccacgacggcgggcttggccccgtccggccgagctggaagggcaagtgcgtcgacgcccacgacttcaacgccaacttgtgcaacaacaagctggttggagccaaggccttcgtcaatgctgcggacgccatggcggggaggaggaagagccgtggcatcgtcccctccccgagggacgaggacggacacggcacgcacgtggcctcgacggccgccggcgctgaggtcggcaacgccagcctccacacgttctccaggggaaccgcgtggggaatggcgcccaaggcgaggatcgcaatgtacaaggcatgcggcgaggtaggctgcctgtttgcggacatcgtagcggcggtggacgctgcggtgaaggatggcgtggacatcatttccatgtccctcggcggcatcccaccagaccctcccttccacgatgacgttgtcgcaatcgccttgtttggtgcggagctcaaaggcgtcttcgtcgtcctcgctggcggcaatgatggcccgcaggcatctacggtgaccaactcggcgccgtggatgaccaccgtaggcgccgccaccgtggaccggctgttcccggcgagcctcaccctcgggaacggggtcgtgctcgccgggcagtccctttataccatgcatgccaagggcacgcccatgatccagttactgtccgccgactgccgccgccccgatgagttgaagagctggacgcccgacaaggtcatgggaaaaatcatggtgtgcacgaaaggagcaagcgacgggcacggcttcctcttgcagaatgctggtggagcagggatagttggtgtggatgctgacgagtggtctcgagatggttccgcaacctattccttcactcttccgggtctcacgctcagctacaccgctggcgagaagctcagggcgtacatggcctcggtgccctatccggtggcgtccttcagcttcggctgtgagacgatcgtccgcaagaaccgggcgccggtggtggcggggttctcatcgcggggccccaaccctgtcgtccccgagctcctcaagcccgatgtcgtcgcgccgggagtgaacattctcgccgcctggtcgggcgacgcatctgtgtcgggatattccgacgtcgacgacggcaggagagccgactacaacatcatctccgggacgtccatggcgtgcccacacgtcgccggcgtcgcggcactgatcatgaacaagcacccaaactggacgccggccatggtacggtcggcgctgatgacgacggccgggacggtcgacaacagaggcggagacatcctcgacaacggggtcaccgtgggccgcaccggcaacggcaacgcaaggatcgcgacgccgctggtggccggggccgggcacgtccagccggacctcgcgctggacccggggctcgtctacgacgccagagagcgcgactacgtcgacttcctgtgcgccctgaactacacggcggaacagatgcggcggttcgttccggacttcgtcaattgcacgggaacgctcgccggcggccccgccggcctcaactacccgtcgttcgtcgtggccttcgacagccgcaccgacgtccgcacactgatgcggacgctgaccaaggtgtccgaggaggcggagacgtacaatgtcactgtcctggcgccggagcacgtgaaggtgaccgtctcgccgacgaccttggagttcaaggagcacatggaagcgaggagctacacggtggagttcagaaatgaagccggtgggaatcgggaggcaggggagtgggacttcgggcagatcagctgggcgagcgggaagcatcaagtcaggagcccggtggcgttccagtggaagaactga

SEQ ID NO: 4839 - DNA, 3200 bp, Oryza sativa Japonica Group
gtcgagatcgttctccccctcccctccttcgctgctctctcctctccccttccaccgtgtgtgctgcatccgccacactagtcccagatctccaaaccctaacccccccaccccgcatgccattctactagccgccgctcgtcatggcgccgccccgcacatcgggtctcctcctcctcctcgccgcggtcgtcgcggccgccgccgtcgtcctcgtcccgccggcggaggcggcggtggcgagcatcgacctggggtcggagtggctcaaggtggccgccgtgcacctcgcccccggacgcgtcccgatcgcggtggccatcaacgagatgtcgaagcgcaagtccccggcgctcgccgcgctcgccgacggcaaccggctcgccggcgaggaggcgtccggcatcaccgcgcgccacccgtccaaggtgttcgcccgcgcgcgggacctcctcgcgaagcccttcccctacgtgcggtccgtcgcggaggcgctcttcctcccctacgacctcgtccccgacgcgcgcggcgccgccgcggtccgcgcggacgacgggcaggtctacaccgtcgaggagatcgtcgcgatggtgctccactacgccgctgggctcgcggatgcgcacgtcggcgctcctgtgcgtgacgccgtcgtcgccgttccgccctactttgggcaggccgaacgccgggccttgacgcaggcggcgcagcttgccggagttaacgtcctcgcgctcatcaatgagcacgccggggcagcgttgcagtacgggatcgacaaggatttctcgaacgagtcgaggcatgttatcttctatgacatgggcgcaggtagtacctacgccgcgctggtgtactactcagcttacaaggccaaggagtttgggaagacggtatcggtgaaccagttccaggttaaggatgttagatgggactccaaacttggaggccttgaaatggaaatgcgcctggtaaactattttgctgatcaatttaataaacaactcggtaatggagttgatatccgccagtctcccaaggcgatggctaagttgaagaagcaagttaagcgtaccaaagaaattctgagtgcaaatactgctgctccaatttcagttgaatcactatataatgatctcgatttcaggagtaccattacacgtgaaaaatttgaagaactttgtgaagaattatgggagcaggctctaactccagttaaagaagtgcttgcacattctggaatgaagattgatgatatctatgctgtagaattaataggaggagctactcgagtaccaaaattgcaggctaagctgcaggaattcctgggaagaagtgacctggataagcatcttgatgcagatgaagcaattgttctgggtgcctcactgcatgcagctaacttaagtgatggaattaagttgaaccgtaagttagggatgattgatggttctacttatggttttgtgtttgaaataaatggcccagattatgtcaaagatgaaagcactgatcaattactggtgccaaggatgaaaaaattgggaattaagatgttcaggtccattagacatactaaagacttcgatgtttctatcagctatgaaaaagcttctgaactgcctccaggtgttacatcacacaaatttgtggagtattctgtatcaggcctgacagatgcaagcgaaaagtacagtagccgcaatttatctgcacccatcaaggcaaatctacatttttctttgagtaggagcggaattatttctcttgatagggcagaagcagtgattgagataactgaatgggttgaagttccaaagaagaatttaactctagagagtaattccaccagtcagactttgtcttcggaaggaggagcagctaatgacacatctgacagtaaggagaatgtgagttctgatggggatgcaaataagtccagtgctccaatagatgagagtaatgcacaagatattgttacagagaaggtgctcaagaaaagaacattcagggtcccgttaaaggttgtggaaaagatggctggtgctggatcaattctttcgaaggagttgtattctgaagcaaaaactaggttagaggcgcttgataagaaggatgctgaaaggaggagaactgctgaactgaaaaataacctggagtcttacatatactctatgaaggagaagctggaagagaacacagaaattttgaccgtctcaactgaacaggagagggaatcttttgcagagaaacttaatgaggtacaagattggttgtatatggatggtgaagatgctcaagcaaatgaattcaaggaacgccttgaccaacttaaggccatcggtgacccaattcttttcagattgagtgagctaaaagcccggccaacggcttgtgaaaatgctagattgtatcttgctgagttgcaaaagattgttaagaactgggactcgaacaaaccgtggcttccaaaaaagagggtagatgaggttgtaagtgaagcagagaaagtaaaaacttggttggaggagaaggaagccatacagaaaagcacccctgtctacagtccacctgctttcacatctgaagaagtctacgaaaaagttctggacctacaagataaggtttctagtgtcaataggatacctaaaccaaaacccaagatagaaaagaaacctcccaaggaagaagagtctgctaacaaagagaaaactgactcttcggaatctgaatccaaagaagctgaatccacggaaacatcgtcggaatcagctgcccctgaagagagtcagtctgaaccacaaaagactgacgatttagaacctgaagctcatgatgagttgtgattattagcgtgaaccttggcaccccgtaggatttgttgggatgatactgatactccaagaaggcactttgtcagaggcaaaattttggttgctcaaattttctcatttgtttgacggccaaaagatgaggtgtaggatttccgtatggactagatgctataggaccagcagaaaggtgatccatagcttctaatcgcagcttctaatcgctgtatagcagtattatggtctctatggcatgctgtcaaagttaatgcctcaaaggcttcgacttcacgactttgtagttgcattgtttgtatcgaactaatttgttttgatattgctgagctatagaaattttacatc

SEQ ID NO: 4840 - DNA, 1571 bp, Sorghum bicolor
gggagaaaaattcatagcaataaacaacaacaataataataaaagaaaggtggcgtagaggataggaggagaacaaaggtcgcgtctcgaaggttcttgccttgttgggaaagggatggcgtcggaggtggaggacgacgcggcggccgcgggggcgccgctggtcgccaacggtgcagccgacgtccgccggaggagggatcaggcgaaggcgattctgtccaagcaggccgtcaagatcgccaccaaggccgagcagcacgacagcttcatctttaaggtcacacacttgctgggtgttcttggatttgggggattttgctatctcttgggtgccagaccacaggatgtgccatatgtgtactgcctattctatatcatattcgttccgctccgctggatttactaccgctacaagaaatggcattactatctcctggacttctgctactatgccaacacctttctccttgtaatgattctcttctatccaaaggatgaaaaacttttcatggtttgcttctcgtttgcagagggtccgcttgcttgggcattaattgtgtggcgttgcagcttggtttttagttcatttgacaaacttgttagtgtcctgatacatctcttacctgggattgttctattcactatccggtggtggaatccacaaacatttgctgccatgcacccagaaggaagagatgccagagacacatggccatatgtggagcacaaatcatatctgtggacatggctcttttttgttccactagctgcttacaccctgtggcaacttatgtatttcctcatagttaatgtcctgcgtcgacagaggttgttaagggaccctgaagtcatgacatcctacagggagctctcaaagaaagcacagaaagcgaacaacatctggtggaggctgagcggactgctgggtgaccggaaccggcaggtcatgtacatactactccaggcgctgttcacagtggcaacaatggccctgaccgtccctatattcctgtcgtaccggatgcacgtggtgttcctgatactcaaggtgtgcgcgtcgacatggaatggtggcagcttcatcttggaggtgatgcctcgacaagtagtacagaagcagcagaagaagaagctggacatgaagcccatcgaacaggggagctcgacacaaagtgcgccaggtgatgatggtacattgggtaaccaccaccatcacacatccgaggagcaaatccaggagtgaggaaattgaagctggatgtaagattagattttgctgtttactgatgcaacctttgtttttactgagtgttctttgtgttgtttttctttagctctgcccaagttgtgatatctataggtttaggttgaatgatatggggctgggaatatgatgcgtgcccatgtttgtcaggcttgggcaaagataactttttcttctcgctgtggcagttgtgaattgcgtgaagctgttgcattgttcgtttgaagatgatgattcgatgatgccatatgctgattttattgcttcgtgttgaaggacagactatagatgaaataatgcttgg

SEQ ID NO: 4841 - DNA, 1644 bp, Zea mays
gtgtgattatataatggacattgtaaatccaggggagcgaaggaaaggcaaaggagaaaatttcgtagcaataaataaataaataaataaaattaataaaagaaaggtggcgtagaggataggaggagaaccaaggttgcgtctcgaaggttcttgcctcgttgggaagggatggcgtcggaggtggaggacgaggcggcgacgccgctgctcgccaacggtgcagccgacgtccgccggaggagggaccaggcgaaggcaattctgtccacgcaggccgtcaggatcgccaccaaggccgagcagcatgagcgcttcatctttaaggtcacacacttgctgggtgttcttggatttgggggattttgctatctcttgggtgccagaccacaggatgtgccatatgtgtactgcctgttctatgtcatatttgttccgctccgctggatttactaccgctacaagaaatggcattactaccttctggacttctgctactatgccaacacctttctccttgtaatgattctcttctacccagaggatgaaaaactttttatggtttgcttctcgtttgcagagggtccgcttgcttgggcattaattgtgtggcgttgcagcttggttttcagttcatttgacaaacttgttagtgtcctgatacatctcttacctgggattgttctattcactatccggtggtggaatccacaaacatttgctgccatgcacccagaaggaagagatgctagagtcacatggccatatgtggaggacaaatcatatctgtggacatggcttttttttgttccgctagctgcttacaccctgtggcaacttatgtatttcctcatagttaatgtcctgcgtcgacagaggttgttaagggaccctgaagtcatgacatcctacagggagctctcgaagaaagcacagaaagcgaacaacatctggtggaggctgagcggactgctgggtgaccggaaccggcaggtcatgtacatactgctccaggcgctgttcacagtggcaacaatggcactgaccgtacctatattcctgtcctaccggatgcacgtggtgttcctgatactcaaggtgtgcgcgtcgacatggaacggtggcagcttcatcttggaggtgatgcctcggcaagtagtgcagaagcagctgaagaaactggacatgaagcccatggaacaggggagctcgacacaaggtgcgccaggtggtgatggtggcacattgggtaaccaccaccagcacacatccgaggagcatatccaggagtgaggaaattgaagctggatgtaagattagattttgatgttcactgacacaacctttgttgtcatcgagtgcgctttgtgttggagtttttctttagttcttcccagtttgtgagttgtgacatctagtcatctataggtttataggctggacgatatggggtgagagattgtgcgtgcccatcttttgtcgggcttgggcaaagatatgtcgagatgtttactttctctgtagaatttcgtgaagctgttgcattgttcgtttgaagatggcgacgatgttcagatgatgcttcatgttgaaggacatatctttatttgcttcattgtacccagatcaaaaaaaaaaaaaaaa

SEQ ID NO: 4842 - DNA, 1386 bp, Oryza sativa Japonica Group
acggcttcggcgagaggaaggggaggggaagaggagaggaggaagggactggaaggttcgatggcgtcggaggtggaggacgatgcggcggcggtgctcaccaacggcggtgccggcgccgcggaagtccggcggaggagggaccaagcgaaggagattctgtccaagcaggccgtcaagatcgccaccaaggccgaggagcacgagcgcttcatcttcaaggtcacacacttgctgggtgttcttggatttgggacattttgctacctcctgggtgccagaccacaggatgtgccgtatgtgtactgcctgttctatgtcatctttgttccgctccggtggatctactaccgctataagaaatggcattactatctcctggacttctgttactatgccaacacttttctccttgttatgattctcttctatccaaaggatgaaaagcttttcatggtttgcttctcatttgcagaggggccgcttgcttgggcattaattgtgtggcgctgcagcttggtttttagctcatttgataaacttgttagtgtcctgattcaccttttgcctggcatagttatattcactatccggtggtggaatccacaaacttttgctgcgatgcatccagaaggaagagcagccagagtcacatggccttatgtggaggacaaatcatacctgtggacatggctgtttgctgttcctctagctgcttacaccctgtggcaacttatgtattttctcatagttaatgtgctgcgtcggcaaaggctgttaaaggatcctgaagtcatgacatcatacagggagctctcaaagaaagcacagaaagcaaacaacatctggtggagactcagcgggcttcttggcgacaggaaccggccactcatgtacatactactccaagcgctgttcacggtggcgacaatggcgcttaccgttcccatattcctgtccttccagatgcatgtggtcttccagatactcaaggtgtgcgcgtcgacatggaacggtggaagcttcatcctggaggtgatgcctaggcaagtcgtccagaaggagaagaagaagctagagatgaagcccatggaagaggctaattcgagccagaatgctgaagaatcacaaggggacctgtcagcaaacggccagcactcatccgagcatagctaagtcactgaaaaaccaaaccatcgcaaacggtagcatttttcagtttttcaccagttaatacactgtggatagcttctctgtgtgttgtgtgctcgaaacaaattatccatgttctgttgggttgagaattttgatgcgtgtgtgaggtttgatctattcagactccaggcagggagcatttctcaggtagaaaattatttttcttttccc

SEQ ID NO: 4843 - DNA, 1460 bp, Hordeum vulgare subsp. vulgare
ggttgcgttgcgttccgtcccgtccgtctccaaggttctctgggatggcgtcgtcggaggtggtggaagacgaggcgtcggcgtcggcggcggcaaagctagccaacggggccgcggacgtccgccggaggagggaccaggccaaggcgctgctgtcgaagcaggccgtcaagatcgccaccaaggcagaggagcacgagcgcttcatcttcaaggtcacacacctgatgggtgttcttggatttgggacattttgctacctcctgggtgccagaccacaggatgtgccgtatgtgtattgcctgttttatgtcatatttgttcctctcaggtggatttattaccggtacaagaagtggcactactatcttctggatttctgctactatgccaatacttttctccttgttatgattctcttttatccgaaggatgaaaagcttttcatggtttgcttctcatttgcggagggcccccttgcttgggcattaattgtatggcgttgcagcttggtgttcagctcattcgataaacttgttagtgttctaatacacctcttgcctggaatagttttgttcactatccgttggtggaacccacaaacatttgctgccatgcatccagaaggaagagcagcaagagtcacatggccatatgtggaggacaaatcttatctgtggacatggctgtttgttgttcctctagctgcttacaccttgtggcaactcatgtatttcctcatagttaatgtgctgcgtcggcaaaggctgttaagggatcctgaagtcatgacatcatacagggaactgtcaaagaaagcacagaaagcaaacaacatctggtggagactgagcggattgcttggtgacaagaatcgtcctttgatgtacatactgcttcaggcactgttcacagtggcgacattggctttcactgtacccatattcctttcgtaccggttgcatgggatcttccaagtactaaaggtgtgtgcggccacatggaacggcggaagcttcatcctggaggtgatgcctaggcaggtcgtccagaaggagaagaagagacttgagatgaagcccattgaacaagcaaacttgaaggagcacatggacggtccctcaggtgaccaccagcatgcatccgaggagccaagtcagtgagggaactgatttggggcgtaagattagattgtctggttgtggtactatcgtgtaacctttgttccttctgtgagaaaagttgctatcgatgaatgttatgttggcttgggacgtttcagggctgtttatggtgggatcgcttggtagggtgtgtgggcatgtttgacatagccataaactgttttgactccctgcacactgcaaacctccattggctcaactctgctaagcgtggtgctcctcccaaagaaagattgggcggaaggaatcgccgattacagacctattagccttatc

SEQ ID NO: 4844 - DNA, 1451 bp, Vitis vinifera
atggcgagcaacgaggaggctgtggaggaggcaaatggggactcatttctggcggtgaagcagagattgagggatcggtccaagaaagtggctcagacgaaggagatgttgtcgaaacaagctgttcagacgaaggagatcttgtccaaacaggccgttaagatcgctaagcaagctgaagagcacgaaagattcatcaacaaggtaactcatctattgggggttctcgggttcggtgcattttgcttcctcttgggtgcaaggccacaagatattccatatgtgtattgtttgttctacttcacctttgttcctctccgatggatctattatcggttcaagaaatggcattattatcttctggatttctgctactatgccaatacaattttcttggtcgtgcttcttctatatccaaagaatgaaaaacttttcatggtttgcttctcatttgcagagggaccattagcctgggcattgattgtttggcgttgtagcttggtgttcagttctgttgacaaaattgttagtgtccttatacatctgttacctgggattgtcttctttactattcgatggtggaatcccacgacctttgaagccatgcatcctgagggaactgcccacagagcttcatggccttatgtggaaaacaaatcctacctgtggacatggctgtttgtggttcccttagcagcttacacactctggcaagttctctattttctcattgttaatgtcctacgcagacagaggctgttgagagatcccgaagtcatgacttcctacagggagctctccaaaaaagcccagaaggcaaacaatatatggtggcgtctaagtggtctgcttggggatcagaatcgactgttgatgtatatcttgttccaaggtgtattcactgtagcaacaacagcactcacagtccccatcttcttgtcatatgaaatgcatgtagttttccaaatacttaaggtctctgcaactgtatggaatggaggaagctttctgctagaagtgatgccaaggcaggtgattcttaaggaaaagaagaaatcagagacgcagccagtccaaacactactggttccatctgcagagacgaatcagcctgatcaaccgccactagttgattatttgaaggagaatggtagtcagcaagatcaatcctcacttgtcgaaacctcagaggagatgaacagctctgctgagccacatccttcgtagcagctgcatacaaaataacatcaatatctgtgtagaactgtgtgttgtgccccatgagagggaactttgttagctcatctaagctgtagttctctgaacttcgttttacaaatcaatcatagtgttctgtttatttagatgggatttacacccagtttcaatagaaaggaagtgtaagagaacttattttcatttttatttttttaatcttttaatgtacgatt

SEQ ID NO: 4845 - DNA, 1388 bp, Glycine max
gggtcgtgaattgtgatagcaccaatcaaaacaaaacaaaaacaccgccatctctctctctctctctctctctctgtgatcgcttcgcgttcatcactgggcagtaaaaatgtctgacacagaagaccatgcagcatcagagtattccaatggtgacgaatcccctccaaagcccagacagaggttcagggacagatctaaggagatgctgtccaaacaagctgtgcagaccaagcaaatgctttccaaacaggccgttaagattgccaaacaagctgaagaacacgaaaggttcatcaacaaggtgacgcatctcgtgggggtcctcggttttggtgggttttgcttccttttaggggcaagaccccaagacattccctatgtatattgtttgttctacgtcatctttgttcctcttcgttggatatactataggttcaagaaatggcattactatctactagacttctgctattatgccaatacaatattcttagttgatcttcttttttactcatcgaacgagaagcttttcatggtttgcttttcttttgctgaggggccattagcatgggctttgattgtttggcgctgcagcttggttttcagttctgttgacaaaattgtcagtgttcttatccatcttttacctggattggttttcttcactattcgatggtggaatcctgctacctttgaagccatgcatccagagggaactgctaggagacctacgtggccttacgtcgaagataaatcctatctctggacatggctgtttttggtacccttggtagcttacactttgtggcaggttctatacttcctcattgtcaacgtcttacgcagacaaagatttttaagagatcctgaagtcatgacttcctacagggaactctcaaaaaaggctcagaaagcaagcaacatatggtggcgcctaagtgggttgcttggggatcaaaatcgcatgctgatgtacatttttcttcaaggcatatttacggtggcaaccatggctcttactgtccccatattcttgtcatatgaattgcatgtagttttccaaatactaaaggtttcggcctcaatatggaacggaggaagttttctgttggaagtaatgcctaggcaggcaattcttaaggagaaaaagaaatcagagatgcaacctgttgaagaagctcaatccaatcatcaatagacaatagagatggaaaatgatagcaagttaaaacaatgttgttgtgacatgtcactccttgctcaactgatatccacgtattttgctgaagttgtaattgtatttgttgatttgtttttactgagagggtgggacgtgggtttggttgttttaaaaaaaaaaaaaaaaaagaaaaaaaaaaaaaaaa

SEQ ID NO: 4846 - DNA, 1176 bp, Ricinus communis
atgtctaataacgaagacccaattaatgagtttgtctccaatggagattcatttgagaaagtgaaacaaagactcaaagaccgatcaaagaaagtggctcaaacgaaggaaatactatcaaaacaagccaatcaaacaaaggagatcttatctaagcaagcagttaagattgcaaaacaagccgaggaacatgaaagctttattaataaggtgactcatcttcttggtgttcttgggttcgggggattttgcttcctcttgggagcaaggccgcaagatattccttacgtttactgtttgttcttttttatatttgttcctcttcggtggatatattatcggttcaagaaatggcattattttctcctggatttttgttattatgccaacacaatattcttggttgaccttcttctatatccaaaagatgaaaagcttttcatggtttgcttctcatttgctgaagggccactagcatgggcattgattgtttggcgttgtagcttggtttttagctctgtggacaaaattgttagtgtccttatacatctgttacctggtttggttttcttcactatacgctggtggaatccagcaacctttgaagccatgcatcctgaagggacgtcaggcagagcatcgtggccatatgtagaagataaatcgttcctgtttacttggctgttcttggtgcccttagttgcttattttctgtggcaacttctttattttctcattgtcaatgtcctgcgtcggcagaggctgttaagagatcctgaagtcatgacttcttacagggagctctcaaagaaagcgcaaaaagcaaataatgtatggtggcgtttaagtggtttgctgggggatcagaatcgcatgcttatgtacattctgttgcaagctctatttactgtggcaactacagcactgacagtccccatcttcttgtcctacgaactgcatgcggttttccagatactcaaggtttcggctgctgtatggaatggaggaagctttctgctagatgtgatgccaagacaggtgattctcaaagagaagaagaaatcagagttgcagccagcacatatccagcaatatcactcagaaccgaagcaagaccaatccccaaattcaatggaaattaggatgaagacgatccattctgctgaggagcagtag

SEQ ID NO: 4847 - DNA, 1311 bp, Zea mays
atcaagattccgaccccaaaatccctctccgagctcgaccaaaaaccaccctctctgattcattccacccacgtccacgtacgtacgtacattcccaccacctcccagtgcagcgccagtctgtaacccataaccataaccataccatggtggtcctcaccaagggcgagctggagcagatcgcgctgccggccgtgcagcgcgcatcgccgccgccgccggccgccgtgccggaggtcgacctggcagccggggacgccgccgccgcgcgcgcggtggccaaggcgtgcgaggaccacggcttcttcaaggtgacgggccacggcgtgccgcagcacctcctggcgcgcctcgaggccgccgcggccgcgttcttcgcgctcccgcagcgggagaaggacagggccgccggctgcccgttcggatacgccagcaagcggattggcgccaacggcgatctcggctgggtcgagtacctcctgcttgccgtcaccgccgccggcgcagcggccgcgccggtgtctgcgtgcgagggcgcggagccgccctgtttccgtgctgtgctggacgagtacgtggcggcggtgaggcgcatgacctgcacggtgctgcagctgatggcgcaggggctgggcctcgacgacagggacgtgttcagccggctggtgctggaccgggacagcgactccatgctgagggtgaaccactacccgccgcggccccagccagcggcggcggcggagacgaggcggctgacggggttcggcgagcacaccgacccgcagatcatctccgtcctccgctccaacgacgcgtccggcctcgagatcacgctgcgggacggcacctgggtgtccgtgccctccgacacggaatccttcttcgtcaatgtcggcgacgcgttgcaggtgctgaccaacgggcggttccggagcgtgcggcaccgggtgatggtgagcagcgcgcggccgcgggtgtcggtgatcttcttcggcggcccgccgccgcgggagcgcctggcgccgctgccgggtctggtggaccgggagggcggccgacgccgctacagggagttcacgtggagggagtacaagaactcggcgtaccggaccaagctggcagacaacaggctctgctccttcgagaccatggcgacgagctagctaagccgccgcgctgacgccggacacggctcatcgccctcccttctcgatgtgtagtgtagcaagagacgtttttttgtgccatatagttttctgtttatacacgataaggctggtctcaacttcgtttaaaaaaaaaaaaaaaaaa

SEQ ID NO: 4848 - DNA, 1448 bp, Hordeum vulgare subsp. vulgare
gatgtcaacctaactgtcttctcatctcatctcaagctcaatccattaattcctcatctgtttcttggatacaaactgactgacaccgcgtagttcatcagtagacgctctctgtgctgcctctgctctgtaaccatggtggttcttgccaagggcgagctggagcagatcgcgctcccggccgtgcacaagacagcaccgccactggccgacttgccggaggtcgacctttccgtggcaagaagcggctctgagggacgggcggccgccgcacgcgcggtggcggcggcgtgcgaggagcatgggttcttcaaggtgacgggccacggcgtgccagcagagctcctggcgcgcgtcgagaacgccgctgccgcgttcttcgcgctctcgcagcgggacaaggaggcggcgatgtcggccgcgacgccgggcagtccgttcggctacgcgagcaagcggataggcaacaacggcgacctcgggtgggtcgagtatctcctgctcggtgtcaccgccgcgggcgccgaggccggcgcgccattgtccgtgcccgaagaggtggtgccgtcagcgtcgctctgctctttccgggaccttctgaacgagtacacggtggccgtgaggaggatgacctgccagttgctggagctgatggcggagggcctgggcatggaagacagggacgcgttcacgaggctggtcctgcacaaggagagcgactcgatgctgcgagtgaaccactacccgccgcgccccgagctgaagcagcaccacggtggcagggtcaccgggttcggcgagcacaccgacccccagatcatctccgtgctccgctccaacgccacctccggcctagagatcgccctgcgcgacggcgactgggtctccgtgccgccggaccagacctccttcttcgtcaatgttggcgacgccttgcaggtactcacgaacgggaggttccggagcgtgagacatcgagtgatggtgaacaacatccaaccgcgggtgtcggtgatcttcttcggcggcccgccgccgcgggagacgctcgcgccgctaccacaactcgtcggggaaggcgggcgcagccgctacaaggaattcacatggtgtgagtacaaagcctcggcgtatggaaccaagctggcggcgaacaggctctgccacttcgagaccaccaactagcaatctagctagcatgcaattgctttggcctttttgtttttgtgaggtgtgtgaaactttatgtgcacgacggcagggtattttttgctagtgtgttcctagtggtcggtacatatgcccagtaaggtttttgtgttgatatatgctgcaaagcattctgtaggtctgtttaagttggaggcatcaagtgcgccacgatggctttccctcaaaaaacaaatttggaggcatcaagttggagtataatgaactgttctggatgt

SEQ ID NO: 4849 - DNA, 2443 bp, Zea mays; identical to SEQ ID NO: 1122

SEQ ID NO: 4850 - DNA, 2937 bp, Sorghum bicolor; identical to SEQ ID NO: 1124

SEQ ID NO: 4851 - DNA, 1909 bp, Sorghum bicolor; identical to SEQ ID NO: 4352

SEQ ID NO: 4852 - DNA, 1708 bp, Hordeum vulgare subsp. vulgare
gtctccctctctctctctgcatcctcctctcgcccatctccctctgttaaactccattgctcaagacaaggccggccggcagaaaatggggacgcaggcagcggagaacgtcgacccgccggcaaaggatgtcaggacagatgagcaaaagaagatcgatgactggctcccgatcacgtcgtcgaggaacgccaagtggtggtactcggccttccacaatgtcaccgccatggttggcgcgggagtgctcagtctccccttcgccatgtccgagctcggctggggtcctggtatcgcggtgctgatcatctcgtgggtgatcacgctctacacgctgtggcagatggtggagatgcacgagatggtgcccgggaagcggttcgacaggtaccacgagctcgggcagcacgcgctcggcgacaagctgggcctctggatcgtggtgccgcagcagctcatcgtggaggtgggcgtgaacatcgtgtacatggtcaccggcgggaggtcgctcaagaagttccacgacgtgatctgcgacggcaagtgcaaggacatcaagctcagcttcttcatcatgatcttcgcgtccgtgcacttcgtgctctcgcagctccccaacttcaactccatctccggcgtgtccctggccgccgccgtcatgtcgctgtcctactcgaccatcgcgtggggcgcgtcggtggacaagggaaagatggtgaacgtggactacaacctccgcgccaccacgatgcccggcaaggtgttcggcttcttcggggcgctcggcgaggtggcgtttgcgtacgccggccacaatgtggtgctggagatccaggccaccatcccgtcgactccagagaagccctccaagaagcccatgtggaagggcgtggtggtggcctacatcgtcgttgcgctctgctacttccccgtcgccctcatcggctactgggcattcggcaacagcgtcgacgacaacatcctcatcaccctcaacaagcccaagtggctcatcgccatggccaacatgatggttgtcatccatgtcatcggaagctaccagatttacgcgatgccggtgttcgacatgatcgagacggtgctggtgaagaagctgcggttccctcccggcctcacactccgcttgattgcccggagcctctatgttgcgttcaccatgttcgtcgccatcaccttccctttcttcggcgggctgctcggtttcttcggcgggttcgcctttgcaccgacgacatacttcctaccctgcatcatgtggctcgccatctacaagcccaaaagattcagcctctcatggtgtaccaactgggtctgcatcgtccttggagtgtgcctgatgatcctgtcgccaatcggagggctcagacagatcatcatggattccaagacatacaagttctactcatagactacttctacgacgcattgtgtcttgtgaaaactgcaagagatcagttacgatgtctattacagactctcttgtctcgcaaaggaaaaagaaaggaacatcatagtaccacggactgttacagatgggatggtacttggtagatgcatatgttcagagaaaacttggtttagtcaaagcaaaagggttgtgtttggggttaatcatgtgtacgtaatatatatggtgtgtggatttgactctccgtactgtaggatcgacaatctttttttccgctcg

SEQ ID NO: 4853 - DNA, 851 bp, Zea mays
aaaggaacatgcactgcggcgccgtgaccacgagtgcactgtgcagcagaaacgctgtgcctgtgcgcctcgctccactgatccaaagctgcgctcgctccaaggtcgccatgggatcgtaccactacacctcgcaattcgtcgattccaaccccaagcccagccacaaacccaagaccaccgtccaaatcccgattaaatcccctcgggaaggatcgcctgacgcggtggcggccgccaagatccaggcggccttgcgtgggtacctggtcaggcggcacgtcacggccgtgcgcgctgccgacgccgaggcgacgcggctcgagcggctgctccggcggcaggagaccgtggacgccgtccgcagcgacgagcgcgagcgggcccggttctcggaggcgctgatggccgtgctgctccgcctggatgccgtgccggggcactaccccgccgtgcgggacgcgcggcgcgccgtgagccgmcgcgtggtcggcctgcaggaggtgytcgacgctgttgccgtggcacccaaagcccagacgtgcggggtgccggcgrgcctggagcaggtcctgcaattgatctggggagtcggagaggcgcctgctccggtgccgccgccgyaggcggaggtggaggaggaagtgagaagggccgggtcatgctgggcaagatttttttggtggagtgtagtgagtagtgtacggtcatagggtggctacagtgtmscacgttgtacggcgccgtgctcatttgtacatgttgtggatgtattacaaaaaaaaaaaaaaaaaaaaaaaaaaaaaaaaaaaaaacaammaaaaaaaaaaaaargaaaaaaaaaaaaaaaa

SEQ ID NO: 4854 - DNA, 630 bp, Sorghum bicolor
atgggatcctaccaccactacacctccacctcgcaattcgtcttcgccgccgtcgattccaaccccaaccccgagcccagccacaaacccaggaccaccgtccaaatccccatcacatcccctccgcctccggagggggctcgggagcgatcgcccgacgcggtggcggccgccaagatccaggcggccttgcgtgggtacctggtcaggcggcacgtcacggccgtgcgcgcggccgacgccgaggcgacgaggctcgagcggctgctccggcggcaggagaccgtggacgccgtccgccgcgacgagcgcgagcgggcccggttctcggaggcgctgatggccgtgctgctccgcctagatgccgtgccggggcactaccccgccgtgcgggacgcgcgtcgcgccgtcagccgccgcgtggtcggcctgcaggaggtgttcgacgctgttgtcgcggcacccgacgcgcagacgtgcggggtaccggcgagcctggagcaggttctggaagggatctggggagtcggagaggcgcctgttccggtgccgccgccggcggcaacggcggtggaggaggaagtgaggagggccgggtcatgctggggaaggttttttggtggagtgtag

SEQ ID NO: 4855 - DNA, 1026 bp, Zea mays
acgagtgcactgcgcacaacgctgtgcgtgtgcggtgtgcgctcgacgattccagacattgcccacgggccacggccgccaaacacagctgccggaactgcacgccctcctcgctccactgatccaaagctgcgcctgcgctcgctccaaggtacccatgggatcccaccaccactacacctccgcctcgcaattcgtcttcgccgccgtcgattccaaccccaaccccaggcccagctacagccacaagcccaagaccaccgtgcaaatccccatcacgtctctaccagaacgggctcgggcgggaccgcccgacgcggcggccgccgccaagatccaggcggccttgcggggctacctggtcatgcggcacgccgcggccgtgcgcggggccgacgccgaggcgacgcggctcgagcggctgctccggcggcaggagaccgtggacgccgtccgcggcgacgagcgcgagcgggcccggttctccgaggcgctcatggccgtgctgctccgcctggacgccgtgccgggacgctacccggccgtgcgggacgcgcggcgcsccgtgagccgccgcgtcgtcggcctgcaggaagtgttcgacgctgttgtcgcggcmcctgcagsgcagacttgcggggttccggctagcctggagcaggtcctygaagggatytggggcatcggaraggcgcctgttccggtgccgccggcgcaggcgatggccgcggtggaggaggaagtkaggaggggcggatcatactgggcaaggttttttggtggagtgggctggccgtgactgtgactctgtgagtgtgtagcgaggagggtacctgggtactagaatggctatagtctactgctgtgccgtactcggctgcacatgtattttgwgatgtgtcgtattgtataccaaagtgccatgttgctgttaatgacrtgagagaaaaactgtaagtcaccatttggatcctttatttcagggctcgtttgtcggcaatgttttaccgaaaaaaaaaaaaaaaa

SEQ ID NO: 4856 - DNA, 2023 bp, Zea mays; identical to SEQ ID NO: 1101

SEQ ID NO: 4857 - DNA, 1996 bp, Zea mays
ccctccccgtccgacttgcaacctctcctgaatcccaccgatcacgcgagctccccgccgcgatgtccgatcaccgagcgaagcggccgtccgacggcgcagccactgtggcatcgccggcggcgaagcgcgcccgcgacccgcccgcgccggcgttacccacgaacaaggaagctcccgacatggcccccaagacccgcatcttctgcgacatcctggcctcccgcgccgacgacgaggaactgaatgccgagctcgacaaggccgacatccgcgtaagcatcgctgacgtcgagcaggtgctccgcttctcctacgcgcacccgcgcgccgccgccgccttctttcgctgggcgggataccggtacctcggccacgagcactccccctactcgtggaacctcctcgtcgacatcctcggtaagaatcgcctcttcgagcccatgtgggacacagtcaaatctatgcagtcgcagcagctgctctcgctcgccactttcgcctccatattctcctccctggcggcgacccccggcggttccccgctcaaggcgttcatggacatgccccgctacggcatgacccgcgacacgccggcgctcaactcgctcctctccgcgctgtgtcgtgccaaccgcctcgacgacgctcgcgccgcgatcccagtagcccgcgccgaggctggcacgcgcccggatgccgactcctacgccatcctcctcgagggcagcgaggccgccgccgacctgcgggttgcgcgcgaggtgttcgacgaaatggtgcaggccattggattttatcctgacaacgtgcctgcctatgactccttcctcactacgcttgtttcaagtgactcctccacggcgctaccggaagcaatggagtacctaaatgtcttgagcaggcacggctgttcgccaggagagaagttcttccgtgctgctcttgctgcacaccttgatgcacgacaattgcgcggagccatgaatctctgggatgactttgttgggcgtcgaggactcgtcccagatatggaaatgtacaacacaatgatcaagctgcagggcagtctcgggcatgctgagctgatagtgggttatctcgacgacatgatctccaatggagtcttccctgataccaacacatacaatgtggtcctccagcttttgtgaagggaaagaagcaccgagaggcagccgcaatatttagcgagatggtcaagaacgaatgttggccaaacgagggaaattgttcacttgcacttcgcatgtttttggatacacactattgggagactgggatcaaagtctggtgctgcatggtggagaatggcttgccacctttacaggagtgtgggaacatgcttgtagcaaagctgaaggatgacaggctacctgaggcatgcaaatatgcagaagacatgattgatcggggtatcaagttgagttcagcgacactgtccaagctgaagcagcgcctgcagaggattaagaaaggagagatccatgatcacctgcttgcaaaatggaaggcacattagtttgttgtgctccctcgtatgggtaacctggtgcgatctcagtgttgacaatgaggttgagccttttatcactctgcaacgtttcaaacaacagttggaagtccctttctagtttctacattgaaattatcatattaatcagctggagcatttgggtctcaaggagtgagctggaacatcttccaagaaattctaccgtctgtatcaaatggctaagcctttttcaagaaagagtttgcccaggttatccatagagcatagaagaaatatttccttgaagaatgactagagcgtcagttgtggtcttttttaatatcttttgtgtcctttttttgtttcatgaattttgttgcttgcagctgtctggctgcaatttaggtagctgtttcttttatgtatttgcataattatcaatgcaacattctaggcgtaaaagtgcattctgacgtaccaggt

SEQ ID NO: 4858 - DNA, 1074 bp, Zea mays; identical to SEQ ID NO: 1126

SEQ ID NO: 4859 - DNA, 851 bp, Zea mays
aaccaaaccgcgccacccagtgttctcactcaccaaccaaccgagcgacacgcctaggacggagcgcgcacatacctgcgacaccatgtcgacgacgacgacgacgatgaaggcgagcgacccggggtccgcgtggttcggcagcggcgcccgggcaccggcggcggcggcggggacgggccacaacgtgcggctcatcaccaccgcggtggccgcgttcgtgtccgtgctcggcctcgccctcttcctccacctctacgtctgccacgtccgccgccgcaaccggcgccgcgcggccgccatagccgccgcgctgccgaccacggccgcggcgccggcccccaagggcgggctggatcccgcggccatcgcggcgctgccgaccaccctctacaggaacgacgcggccgaggcgggcgccggctccgacgagtgcaccatctgcctcggcgccgtgcaggacggcgaggtcgtgcgcgcgcttccggcctgcggccacgtgttccacgtcccctgcgtcgacacttggctcgcgtcgagctcgtcgtgcccggtctgccgcgccgaggtggagccgccgccgccgacggcggtgggctcagctcggttcgtgcaggagaaagtgcaggacgctgtgaagcaggaagccggcagctccactccggaccgggggatcggtgcctgtgcgtcgctcatcaagatgttgagcagggagaggccggcgccgcgaaggccccagggcgcctacgccgacgccggggacttggacgacttggaacggcagcagtatgctgttgccgtgaataattaattactctattattttttttctctaaaaaaaaaaaaaaaaa

SEQ ID NO: 4860 - DNA, 1091 bp, Sorghum bicolor
gcgccacccagtcttctcttctcacttctcactcaccaaccaaccgagcaacttggctcgtcgtacctgcgacacgccgaggagagcgcgcgcgtgctgaggctgagctgtcggagctaagctagccagaacaaaccatggcgacgacgacgacgacgacgacgacgatgaaggcgagcgacccggggtccgcgtggttcggcagcggcgccagccggacaccgtcggcggcggggacgggcggccacaacgcgcgcctcatcaccaccgcggtcgcggcgttcgtgtccgtgctcgggctcgccctcttcctccatctctacgtctgccacgtccgccgccgtaaccggcgccgcgcggaggcggccagagccgccgtgctgccgaccacggcggcggctccggcgaagtgcgggctggatgccgcggccatcgcggcgctgccgaccaccatctacagggacgacgtgggcggcgaggcggccaccgacgagtgcaccatctgcctcggcgccgtggaggacggcgaggtggtgcgggcgctcccggcctgcggccacgtgttccacgtcccctgcgtcgacacctggctcgcgtcgagctcgtcgtgcccggtctgccgcgccgaggtggagccgccgccgccgacggccacggtgggctcagctcggttcgtgctggagaaggtgcaggacgctgtcaaggaggaagccggcagctgcagctccacgccggagcgggggatcggtgcctgtgcgtcgctgatgaagatgctgagcagggagaggccggcggcgccgcgaaggccacaacagggagcctacgccgacgccggggacttggacgacttggaacggcagcagtatgctgttgctgtgaataattaatcttttttttttcaaaaaaaaatgacggcctttttagtttggtcgttttccacatcatgtgtacatcccgcacgtaagtggtgcagtactaagacaagtctgtgagctcttaaattttttgatgaatgtaagggcccgtttgaaattaaagaattgatatgcttcgaatctctacaatttagttcaaatctgaactaaatcctt

SEQ ID NO: 4861 - DNA, 915 bp, Zea mays
agcccaccaaaccgcgccacccattgttgtcgcttctcacttctcactcaccaaccaacccaaccgagcaacttggctcgtaccgtacgtagtacctgctgcgacacgccgaggagctagacctgttggagctaggacagtcagacacgagacgacagagaccatgtcgacgacgacgatgaaggcgagcgacccggggtccgcgtggttcggcagcggcgcacgcacccggtcggcggcggggataagccacaacgcgcggctcgtcaccaccgcggtcgccgcgttcgtgtccgtgctcggcctcgccctcttcctccacctctacgtctgccacgtgcgccgccgcaaccgccgccgcgcggcggcagtgctgccgacgaccacggccgccgcggcggcggcggcggccccgaagcgcgggctggatcccgcggccgtcgcggcgctgccgaccgtcctctacagggacgcgggcggcgccgacgatggcgccgagtgcaccatctgcctcggcgccgtgcaggaaggcgagctggtgcgggcgctcccggcctgcggccacgtgttccacgtcccctgcgtcgacacctggttcgcgtccagctcgtcgtgcccggtctgccgcgccgaggtcgagccgccgccgccgccgccggcactgagctcatcggctcggttcgtgcaggcggagaaggcggcgcaggacgccgtcaaggaggaggccggcagctccacgccggagagggggatcggtgcctgcgcgtcgctgatgaagatgctcagcagggagaggccggcgccgcggaggccacacgccgacgccggggacttggacgacttggaacggcagcagcattctgttgccgtcaataattagcctattgttttttattagaaaaaaaaaaaaaaaaa

SEQ ID NO: 4862 - DNA, 1077 bp, Zea mays
accgcgccacccattgttgtcgcttctcacttctcactcaccaaccaacccaaccgagcaacttggctcgtaccgtacgtactacctgctccgacacgccgaggagctagagaggaccgcgcgcgtgctgctgacctgcgggagctaggacagacacgatacgacagataccatgtcgacgacgacgacgaaggcgagcgacccggggtccgcgtggttcggcagcggtgcacggacccggtcggcggcggggataagccacaacgcgcggctcgtcaccaccgcggtcgccgcgttcgtgtccgtgctcggcctcgccctcttcctccacctctacgtctgccacgtgcgccgccgcaaccgccgccgcgcggcggcagtgctgccgacgaccacggccgccgcggcggcggcggcggccccgaagcgcgggctggatcccgcggccgtcgcggcgctgccgaccgtcctctacagggacgcgggcggcgccgacgatggcgccgagtgcaccatctgcctcggcgccgtgcaggaaggcgagctggtgcgggcgctcccggcctgcggccacgtgttccacgtcccctgcgtcgacacctggttcgcgtccagctcgtcgtgcccggtctgccgcgccgaggtcgagccgccgccgccgccggcactgagctcatcggctctgttcgtgcaggcggagaaggtggtgcaggacgccgtcaaggaggaggccggcagctccacgccggagagggggatcggtgcctgcgcgtcgctgatgaagatgctcagcagggagaggccggcgccgcggaggccacacgccgacgccggggacttggacgacttggaacggcagcagcattctgttgccgtcaataattagcctattgttttttattagaaaaaaaaggaaagaaaggcggcctttttagtctggtcgttctccacatcatttgtatatcccgcatttgcgtgagtggtgcagtagtaagacaggtctgtgactgtgagctcttgactttttttgatgaatgtaagagcccatttcaaaagaattggtatggttcgaatctc

SEQ ID NO: 4863 - DNA, 1617 bp, Oryza sativa Japonica Group
cctgcttcattgctcactccggcggcgatggccgacgacgtcgcgccgcgcaccgcctccgcctacctcgacccctcctactgggacgagcggttcgggaaggaggagcactatgagtggttcaaggatttctcccacttccgccacctcctcgccccgctcctctccccttccatctcggttcttgaggttgggtgtggcaactcgcggctcggggaggagctgctgcgggagggcgtcgccggcggcatcacctgcgttgacctctcgcccgtcgccgtccagcggatgcgtgaccgcctcgcggagcagggcaccgagggtgtggaggttgtggtggcggacatgcttgatctgccgttcgatcgtgagagcttcgatctcgtgattgagaaaggcaccatggacgtattatttgtggacagtggtgatccttggaacccaaatcctacaacagtggataatgtgatgaaaatgcttgaaggtatccacaaggttttgaagcctgaaggcatatttgtatcaattacctttggacagccacatttccgtcgtcgattttttgaagcacctgggtttacatggtctgttgagtggagcacctttggtgatggcttccattatttcttctatattcttaaaaagggcaagaggttgttggattccaacggtaaccaacatacacagcctgctgctccaagcattaatatgttccatgaagagcttgagagtgaggactacatattccgaacaaatgttgatgagttgtaactggcaatttaacaagtgcatcatcggcttgggtgggagttttgatgaagctactacacatcaagagagacgtcccgtccagcatcaacttggtagatgaatgatcttggacagatgcatggaaagatcttgcttggtgctgtaccattgccctggctagggatttctgtgccagctgaattgactagaaaacaggtacctttatcattgttcccagatttttagtaaaccttccaaagaagttcccttttgtttccaaacaatgcacttctttgctactccctccgtttcatattataattcgtttgacttttttaaattctatttttttaagtttgaccaagtttgtagaaaaatatagtaacatttttaacccaaaacaaacatattattaaaatatattcaatgttaaatttaatgaaactaatttggtgttgttaatgttgctagtttttttttataaacttggccaaacctaaagaactttgaccaagtaaaaagtcaaacgatttatatgaaacggagggagtactaaagtagcaatgatgttatctgatgctgcaaatatgccttctgacggtgtcaactgtggcctagtttggcacgtccaaaatcctggtctatcccatggggtgagtaatttggttcaatttcctgggcatttgcaagctaggccttcagtttcatgttaggacttgtctggaattcatggaaaattttatgggaaccttgctttgttctatactccccactactaatgacctactttgtggagttcctaaaaaattatgacagatgccttaatcaatgctccatttatttcaaaatataaggcagatgtttcat

SEQ ID NO: 4864 - DNA, 999 bp, Hordeum vulgare subsp. vulgare
gacacgctgcaccagcgccagaggccgccaagcaaagcgcacgcaccccgcacgcggcggcgatggcggacgacgtcgccccgtgcaccgcatccggctacctcgacccctcctactgggacgggcggttcgggaaggaggagcactacgagtggttcaaggacttctcccacttccgccacctcctcgccccgctcctctccccctccctctcggttctggaggtcggctgcggcaattcgcggctcggggaggagctcttaagggagggcgtcgccggcggcgtcacctgcatcgacctctcgcccgtcgccgtccagaggatgcgcgacagactggcggagcagggcaccactggtgtggatgtggtggtggctgacatgcttgaccttccgttcgagagcgagagcttcgaccttgtgatcgagaaagggaccatggatgtgttgtttgtggacagtggtgatccatggaaccccaatcctacaacagtggataatgtaaccaaaatgcttgaaggtatccacaaggttttgaagccagatggcaaatttgtatcaattacctttggacagccacacttccgtcgtcgatttttcgaagcacctgagcttacatggtctgttgagtggaacacctttggcgatggcttccattatttcttctacatccttcagaagggcaaaagatcaccagagtccaccggtcaccaagttacattgcctgctgctccaagcttcaatatgctccatgatgagctcgaaagcgaggattacttatttcgcacaaatgttgatgagttataagcagtaactcagtaagcgagtgcgcccgttttggaggttttgattttacgccatacacatgaaggggctgatcgttaagcaacccagcgagtgatgcttgtacatgccttgttgtgtggtgatgtaacattgcccagcaggctagagatctctgtatcatcagaactgacaatacacacctattctcaatgtt

SEQ ID NO: 4865 - DNA, 1077 bp, Zea mays
cttttcgcctgcctgcacacgccgccgccggcaatggccgcctgcgacgacgacgtcgccccgtcaaccgcctccgcctaccttgacccctcttactgggacgcgcggtttgggaaggaggagcactacgagtggttcaaggacttctcgcacttccgccacctcctcgcgccgctcctctccccgtccctctcggtcctcgaggtcgggtgcggcaactcgcggcttggcgaggatctcctgcgggagggcgtcgccggcggcatcacctgcgttgacctgtcccccgtcgccgtccagcggatgcgcgaccgcctcgccgctctaggcaccaaaggcgtggatgctgtggtggcggacatgcttgatctgccgtttgagcaagagagctttgatctcgtcattgaaaagggcaccatggatgtgttgtttgtggacagtggcgatccatgggaccccaatcctacaacagtggaaaacgtgatgaaaatgcttaatggtatccacagggttttgaagccagaaggcatctttgtatcaattgcctttggacagccacactttcgacgccgattttttgaagctcctgagttcacatggtctattgagtacagtacctttggcgacagcttccattatttcttctacactcttaagaagggcaagaggtcactggagtccagcagttaccaaaacacattaccatcacctgttgctccaagaataaatatggtccacgaagagctcgagagcgaggattttatattcctcacaaaccttgatgggttgtgagtggctgcttaaacaagcatctggctaacagcctaacacatcaaaagggtgaccaggccagcgttggtgaccctgcagtgatgtttttttcctgggcggcaaatgagaatgatgcctgtaaaatgtgtaatttaggatagatttaaattttgagctttgttgtctagtaatactataatactctatattactgcaggctagaggtctgtatgatcttgtaaaaattagtattactttccttttgaaatctaatgcttcgacttaactcaaaaaaaaaaaaaaaaa

SEQ ID NO: 4866 - DNA, 1021 bp, Sorghum bicolor
atggccgcctccgccgacgacgtcgccccatcaacggcctccgcctacctcgacccctcctactgggacgcgcggttcgggaaggaggagcactacgagtggttcaaggacttctcccacttccgccacctcctcgcgccgctcctctccccgtccctctcggtgcgcgacaccagcagcctcacctgcgtcgatctgtcccccatcgccgtccagcggatgcgcgaccgcctcgccactcagggcaccaaaggcgtggatgttgtggtggccgacatgcttgatctgccgtttgagcaggagagctttgacctcgtcatcgagaagggcaccatggacgtgttgtttgtggacagtggcgatccatgggaccccaatcctacaacagtggataacgtgatgaaaatgcttaaatgtatccacagggttttgaagccagaaggcgtctttgtatcaattacctttgggcagccacactttcgacggcgattttttgaagctcctgagtttacatggtctgttgagtacagtacctttggtgatggcttccattatttcttctacactcttaagaagggcaagaggtcaccggagtccagcagttaccaaaatacattacctgctgctccaaaactaaatatggtccacgaagagctcgagaacgaggacttcatattcctcacaaaccttgattagctatgagtggcagcttaacaagcaactgagctaacacatcaaaagggagaccagttcagtgtttgtgatcctgcagtgatgttttatttttcctgggcggcaaatgggaatgatgcctgtaaaatgtgtgatttaggataggattacattttaggccttgttctttagtagtgctataatataatactgcaggccatagatcaatctgtgatctgttttaaacattagtagtttccatttgaaatatactctttcgactttctaaacatatggaatgaaattgtattatttctactgttatatgaaatccataaatgaaagtact

SEQ ID NO: 4867 - DNA, 1890 bp, Zea mays
cacctcggcccgccccacctttcttgccgcccctgcactgcacgcctccccgtgctcgatctcggtgctccacgccaccacgtcatggctcacgctcgctccagccaccgccgcacgggcctcctcctggccatggccgtcgtcgtcgtggcgtcgcttatcgccgccgcggacgcgtccagcttcgggttcgacctccaccaccggttctccccggtggtccggcggtgggcggaggcccggggcggccctctcgccgcggaccagtggccggctcgaggcacgccggagtactactccgcgctgtcccgccacgaccgcgcccgccgcgccctcgctggcggcgccgacgacgggctcctcaccttcgccgccggcaacgacacctaccaatccggaacgctgtactacgcggaggtggagctgggcacgccgaacgcgacgttcctggtggcgctggacaccggcagcgacctcttctgggtgccgtgcgactgcaggcagtgcgcgaccatccccagcgccaacgggacggggcaggacgcgccgtcgctgcgcccctacagcccgcggcggtcgtcgacgagcaagcaggtggcgtgcgacaacccgctgtgcgggcagcggaacggatgctccgccgcgaccaacggcagctgcccgtacgaggtccagtacgtgtccgccaacacgtcctcctccggggtgctggtgcaggacgtgctccacctcacacgggagcgcccgggccccggcgccgccggggaggccctgcaggcgcccgtcgtgttcgggtgcgggcaggtgcagacgggcgcgttcctggacggcggcggcggcgccgtcgacggcctcatggggctcggcatgggcaaggtgtccgtgcccagcgcgctcgccgccagcggcctcgtcgcgtccgacagcttctccatgtgcttcggcgacgacggcgtcggccgcgtcaacttcggcgacgccggcagccgcggccaggccgagacgccgttcaccgtccggagcttgaacccgacgtacaacgttagcttcacgtccatcggcgtcggcagcgagtcggtggcagcggagttcgccgccgtcatggactccggcacgtccttcacgtacctcagcgacccggagtacacgcagctcgccaccaaattcaactcccaggtcagcgagaggagagtgaatttcagcagtggctctgcagatccttttcccttcgagtactgctacagactcagccctaaccagacagaggtggcgatgccggacgtgagcctgacggccaaagggggagccctgttcccggtcacccagccgttcatccccgtcggcgacacgaccggccgtgccgtcggctactgcctggcgatcatgaggaacgacatggccatcggcatcgacatcatcggccagaacttcatgaccgggctcaaggtcgtcttcgacagggagaggtccgtcctgggctgggagaagttcgactgctacaggaacgcgagggtggcggacgcgccggacgggagcccgggcccgagctcggccccggcggcggggccgaccaagatcacgccgcggcagaacgacggcagcggcagcgggtaccccggcgcggcgcccctgccgaggtctgccggctcgcgcaacgccgccgccgcgctgggactgggatgcctctacctgctgctggccgcagcgcttgtctgacaccgccggtgactggatcgttttcgtgtacagacatagatactgctcccgtttcggttcagagttcagatgcatagaaaatcattcgttgtaggctaatgggataggataaaaattttgctgatcgatgtgggtgatacgatgttactcagtggctgatggaagccatttctg

SEQ ID NO: 4868 - DNA, 1873 bp, Zea mays
agtcacgtccgctccaaacccaccaacctcgccaccaccacctcggcccgccctacctttcttgccgcccctgcactgcacgcctccccgtgctcgatctcggtgctccacgccaccacgtcatggctcacgctcgctacagccaccgccgcacgggcctcctcctggccgtggccgtggccgtcgtcgtcgtggcgtcgcttgtcgccgccgcggacgcgtccagcttcgggttcgacctccaccaccggttctccccggtggtccggcggtgggcggaggcccggggcggccctctcgccgcggaccggtggccggctcgaggcacgccggagtactactccgcgctgtcccgccacgaccgcgcccgccgcgccctcgctggcggcgccgacgacgggctcctcaccttcgccgccggcaacgacacctaccaatccggaacgctgtactacgcggaggtggagctgggcacgccgaacgcgacgttcctggtggcgctggacaccggcagcgacctcttctgggtgccgtgcgactgccggcagtgcgcgaccatccccagcgccaacgcgacggggccggacgcgccgccgctgcgcccctacagcccgcggcggtcgtcgacgagcgagcaggtggcgtgcgacaacccgctgtgcgggcggcgcaacggatgctccgccgcgaccaacggcagctgcccgtacgaggtccagtacgtgtccgccaacacgtcctcgtccggggtgctggtgcaggacgtgctccacctcacacgggagcgcccgggccccggcgccgccggggaggccctgcaggcgcccgtcgtgttcgggtgcgggcaggtgcagacgggcgcgttcctggacgacggcggcggcgccgtcgacggcctcatggggctcggcatgggcaaggtgtccgtgcccagcgcgctcgccgccagcggcctcgtcgcgtccgacagcttctccatgtgcttcggcgacgacggcgtcggccgcgtcaacttcggcgacgccggcagccgcggccaggccgagacgccgttcaccgtccggagcttgaacccgacgtacaacgttagcttcacgtccatcggcatcggcagcgagtcggtggcagcggagttcgccgccgtcatggactccggcacgtccttcacgtacctcagcgacccggagtacacgcagctcgccaccaaattcaactcccaggtcagcgagaggagagtgaatttcagcagtggctctgcagatccttttcccttcgagtactgctacagactcagccctaaccagacagaggtggcgatgccggacgtgagcctgacggccaaggggggagccctgttcccggtcacccagccgttcatccccgtcggcgacacgaccggccgtgccatcggctactgcctggcgatcatgaggaacgacatggccatcggcatcgacatcatcggccagaacttcatgaccggactcaaggtcgtcttcgacagggagaggtccgtcctgggctgggagaagttcgactgctacaggaacgcgagggtggcggacgcgccggacgggagcccgggcccgagctcggccccggcggcggggccgaccaagatcacgccgcggcagaacgacggcagcggcagcgggtaccccggcgcggcgcccctgccgaggtctgccggctcgcgcaacgccgccgccgcgctgggactgggatgcctctacctgctactggccgcagcgcttgtctgacaccgccggtgactggatcgttttcgtgtacagacatagatactgctcccgtttcggttcagagttcagatgcatagaaaatcattcgttgtaggctaaaaaaaaaaaaaaaa

SEQ ID NO: 4869 - DNA, 1981 bp, Sorghum bicolor
acctcaccactaccccggcccacctttcttgcggcccctgcacgcctccccgtgcagccggccagccgtgctccacgtcatggctcaggctaactccaaccaccgctgcacgggcctcctcgtggccgtcgccatcgtcgcagtgtcgttccttgtcgccgccggggacgcgtccagcgtcgggttcgacctccaccaccgcttctctccggtggtccggcagtgggcggaggctcggggacaccccttcgccgcgcaggactggccagcccgaggctcgccggagtactactccgcgctgtcccgccacgaccgcgccgtcctctcccgccgcgccctcgccgacggcgccgacgggctcgtcaccttcgccgccggcaacgacaccttacaatacatcggatcgctgtactacgcggtggtggaggtgggcacgccgaacgcgacgttcctggtggcgctggacaccggcagcgacctcttctgggtgccctgcgactgcaagcagtgcgcgtccatcgccaacgtcaccgggcagcccgcgacggcgctccgcccctacagcccgcgggagtcgtcgacgagcaagcaggtgacgtgcgacaacgcgctgtgcgaccgtcccaacggctgctccgccgccaccaacggcagctgcccgtacgaggtccagtacctgtcggccaacacctccacctccggggtgctggtgcaggacgtgctccacctcacccgggagcgcccaggcgccgccgccgaggccggggaagccctgcaggcgcccgtcgtgttcgggtgcgggcaggtgcagacgggcacgttcctggacggcgccgccttcgacggcctgatggggctcggcagggagaacgtgtccgtgcccagcgtgctcgcctcaagcggcctcgtcgcgtccgacagcttctccatgtgcttcggcgacgacggcgtcggccgcatcaacttcggcgactccggcagcagcggccagggcgagacgcccttcaccggccggagaacgctgtacaacgtgagcttcacggccgtcaacgtcgagaccaagtcggtggcggcggagttcgccgccgtcatagactctggcacgtccttcacctacctcgccgacccggagtacacggagctcgccaccaatttcaactcgctggtccgcgagaggagaaccaatttcagcagcggctctgcagatccttttcccttcgaatactgctacgcactcggcccgaaccagacagaggcgctgatcccggacgtgagcctgacgaccaaggggggagcccggttcccggtcacccagccggtcatcggcgtcgcctccggccgtaccgtggtcggttactgcctggcgatcatgaagaatgacctcggcgtcaatttcaacatcatcggccagaacttcatgacggggctcaaagtcgtcttcgaccgggagaaatccgtcctgggctgggagaagttcgactgctacaagaacgccagggtggcggacgcgccggacgggagcccaagcccagccccggcggcggacccgaccaagatcacgccgcggcagaacgacggcagcagcaacgggttccccgccgcggcgcccctgccgaggtcggccggctcgcgcaacgccgctgccagcgcgctgggggcgggaggcctctcgctgctgatgctggtagctgcaacgctcgtctgacgccggtgactgggattgttcacgccggccacggcggcttcctgctgtgcttgtgtacagactacagagtacagactatacagctcgattttggttcagagttcagacttctgatacatagatgattcattgtagtttatatgggatggaatataggatacagttttgctgattggtgtggatgagatggtattactcatttactcctttcactgatgaaaggcgttctgtattctggatttctgatacgtttcatgaatatataccaataaaagt

SEQ ID NO: 4870 - DNA, 3271 bp, Hordeum vulgare subsp. vulgare
gggtcggtctccccttcacaattcacatttccccttcccgttcattcccctccgaactattgcctcgcctcgcctcgcctcgccacccccgtctctgacggccatggcccacctccagcttacggcggtcgccggcggccgcgacgacgagatggaggaggtggcgctgctggggtcctacggcgagccggagggcctgagctcgcggactgggcaggaggaggaggaggaggaggacgcgggcatgcgccgggcccaggtgcgggtcacgggcatgacgtgctccgcctgcacgggcgccgtcgaggccgccctctccgcccgccgcggcgtccggagcgccgccgtgtcgttgctgcagaaccgcgcccacgtcgtgttcgaccccgcgctcgcaaaggaagaagacatcgtagaagcaatagaagatgctggatttgaagcagagatcctcccagactctgctgtttctcagccaaagtcacagaaggctttgtcaggccaatttaggatagggggcatgacttgtgctgcctgtgtgaactcagttgaagggatcttaaagaagttgccaggtgtaaacagagcagttgttgcattagcgacctcattaggggaagtcgagtacgatccggctgctattagcaaagatgagattgttcaggctatcgaggatgctggttttgaagctgcactgttacaaagtagtgagcaagataaggctttattaggtttgataggattgcatacagagagagatgtaaatttattatatgatatcctgagaaaaacagaaggcctgcgccagtttgatgtaaattctgtaagggcagaagttgaaattacattcgatccagaagtcgttggtttgagatcgattgtggatattattgagattgaaagcagtggcagactgaaagcccatgtacagaacccatatgtacggtcttcttcaaatgatgcgcaagaggcttcaaaaatgcttcacctccttcgctccagcttattcctaagtattccagtgttttttatgcgcatggtgtgccctcacatatctttcattaactcattcctactcatgcactgcggaccatttcgtataggagatctgctcaagtggatgctggtgagcgtagtacagtttgttgttggcaaacgtttctacgtcgcagcttatagggcccttagacatggctctacaaatatggatgtattggttgttcttggcacaactgcgacatatgtatactcagtttgcgcgcttctttatggtgcattcactggatttcatcctccaatgtattttgagacaagcgcaatgataattacatttgtgctattggggaagtatcttgaggtgcttgctaaaggacggacatcagatgcaattaagaaacttgtagagctggttcctgctacagctatcttgcttctgaaatacaaagatggaaaatatgctggagagaaggaaattgatgcattgttgatccaacctggtgatgtcttaaaagtgcttcctggctcaaagattcctgctgatggtatcgtcacttggggtacaagccatgttgatgaaagtatggtaactggtgaatctgcgtctatctccaaggaagtatctagttcagtaattggaggcaccatgaacctaaatggcacccttcacatacaagcggcgaaagtaggatcagggacagttttgagccagataatatctcttgttgagactgcccagatgtctaaagcacctattcagaagttcgctgattacgtggccggcatttttgttcctattgtcatcaccttgtccttactgacattctgtacatggtttgtatgtgggacgctgggggcatatccaaattcatgggtttcagaaactagcaattgctttgttttctccctcatgttctccatctctgttgtggtaattgcctgtccatgtgctcttggtctggcgacaccaactgctgttatggtagcaactggagttggtgccaatcatggagtacttgtaaagggtggagatgcactggagagggctcagaatgttaaatatattatatttgataaaactgggacactgacacaaggaaaggccactgtaacaacgacgaaagtgttctcaggaatggatgttggcgacttcctcacattggtagcatctgcggaggcaagcagtgagcatccacttgcaaaagctatcttggattatgcatttcatttccatttctttggcaaactcccctcatcaaaagatgatgttaagaaaagaaaagaagacgcattctctcaatggctcttggaagttgctgatttttctgccttgcctggcaaaggagttcaatgtttgatcaatgggaagatgattctggtgggcaaccgtgctttgatatctgaaaatggggttaacattcctgaagaggctgaaagtttcttggtagacatggaattgaatgcaaagacaggcattcttgtagcatatgatggcgacttcattggattaatgggggtaactgatcccttgaaaagggaggctgctgtagttatacaaggcctaaaaaagatgggcatttatccagttatggtgacaggggacaattggaggactgcactggcggttgcaaaggagattggaattgaagatgtgagagcagaggtcatgcctgctggaaaagccgacgtaatccgctctttgcagaaggatgggagtgtggttgcaatggttggagatgggatcaatgattcccctgccctagcagcagccgatgttgggatggccatcggtgcagggactgacattgccatcgaggcagcagattatgtgctggtgcggaataaccttgaagacgtcatcacggcgattgatctctcaaggaagacattcagccgaatccggtggaactacttctttgccatggcttataacatcgttgccatccccgtggctgccggcgcactcttccccctcatcggcctgcagatgccgccatggctggctggtgcttgcatggccttctcgtctgttagtgtagtatgttcctcgctgctactgaggagatatagaaaaccaaggcttaccaccgtcttacagataactgtagagtgattcccgcctgtttatgtgtgcgacatttctatttgaaagaaatgcacatggcatctgtttgtaatcaagtgatgataccgtttttgacacttgtgcttgtaaatagcatatacccaaaaaggctttcgccccgctttataaataaagcaaccaacatcgacc

SEQ ID NO: 4871 - DNA, 3223 bp, Hordeum vulgare subsp. vulgare
ggtcggtctccccttcacaattcacatttccccttcccgttcattcccctccgaactattgcctcgcctcgcctcgcctcgccacccccgtctctgacggccatggcccacctccagcttacggcggtcgccggcggccgcgacgacgagatggaggaggtggcgctgctggggtcctacggcgagccggagggcctgagctcgcggactgggcaggaggaggaggaggaggaggacgcgggcatgcgccgggcccaggtgcgggtcacgggcatgacgtgctccgcctgcacgggcgccgtcgaggccgccctctccgcccgccgcggcgtccggagcgccgccgtgtcgttgctgcagaaccgcgcccacgtcgtgttcgaccccgcgctcgcaaaggaagaagacatcgtagaagcaatagaagatgctggatttgaagcagagatcctcccagactctgctgtttctcagccaaagtcacagaaggctttgtcaggccaatttaggatagggggcatgacttgtgctgcctgtgtgaactcagttgaagggatcttaaagaagttgccaggtgtaaacagagcagttgttgcattagcgacctcattaggggaagtcgagtacgatccggctgctattagcaaagatgagattgttcaggctatcgaggatgctggttttgaagctgcactgttacaaagtagtgagcaagataaggctttattaggtttgataggattgcatacagagagagatgtaaatttattatatgatatcctgagaaaaacagaaggcctgcgccagtttgatgtaaattctgtaagggcagaagttgaaattacattcgatccagaagtcgttggtttgagatcgattgtggatattattgagattgaaagcagtggcagactgaaagcccatgtacagaacccatatgtacggtcttcttcaaatgatgcgcaagaggcttcaaaaatgcttcacctccttcgctccagcttattcctaagtattccagtgttttttatgcgcatggtgtgccctcacatatctttcattaactcattcctactcatgcactgcggaccatttcgtataggagatctgctcaagtggatgctggtgagcgtagtacagtttgttgttggcaaacgtttctacgtcgcagcttatagggcccttagacatggctctacaaatatggatgtattggttgttcttggcacaactgcgacatatgtatactcagtttgcgcgcttctttatggtgcattcactggatttcatcctccaatgtattttgagacaagcgcaatgataattacatttgtgctattggggaagtatcttgaggtgcttgctaaaggacggacatcagatgcaattaagaaacttgtagagctggttcctgctacagctatcttgcttctgaaatacaaagatggaaaatatgctggagagaaggaaattgatgcattgttgatccaacctggtgatgtcttaaaagtgcttcctggctcaaagattcctgctgatggtatcgtcacttggggtacaagccatgttgatgaaagtatggtaaccggtgaatctgcgtctatctccaaggaagtatctagttcagtaattggaggcaccatgaacctaaatggcacccttcacatacaagcggcgaaagtaggatcagggacagttttgagccagataatatctcttgttgagactgcccagatgtctaaagcacctattcagaagttcgctgattacgtggccggcatttttgttcctattgtcatcaccttgtccttactgacattctgtacatggtttgtatgtgggacgctgggggcatatccaaattcatgggtttcagaaactagcaattgctttgttttctccctcatgttctccatctctgttgtggtaattgcctgtccatgtgctcttggtctggcgacaccaactgctgttatggtagcaactggagttggtgccaatcatggagtacttgtaaagggtggagatgcactggagagggctcagaatgttaaatatattatatttgataaaactgggacactgacacaaggaaaggccactgtaacaacgacgaaagtgttctcaggaatggatgttggcgacttcctcacattggtagcatctgcggaggcaagcagtgagcatccacttgcaaaagctatcttggattatgcatttcatttccatttctttggcaaactcccctcatcaaaagatgatgttaagaaaagaaaagaagacgcattctctcaatggctcttggaagttgctgatttttctgccttgcctggcaaaggagttcaatgtttgatcaatgggaagatgattctggtgggcaaccgtgctttgatacctgaaaatggggttaacattcctgaagaggctgaaagtttcttggtagacatggaattgaatgcaaagacaggcattcttgtagcatatgatggcgacttcattggattaatgggggtaactgatcccttgaaaagggaggctgctgtagttatacaaggcctaaaaaagatgggcatttatccagttatggtgacaggggacaattggaggactgcactggcggttgcaaaggagattggaattgaagatgtgagagcagaggtcatgcctgctggaaaagccgacgtaatccgctctttgcagaaggatgggagtgtggttgcaatggttggagatgggatcaatgattcccctgccctagcagcagccgatgttgggatggccatcggtgcagggactgacattgccatcgaggcagcagattatgtgctggtgcggaataaccttgaagacgtcatcacggcgattgatctctcaaggaagacattcagccgaatccggtggaactacttctttgccatggcttataacatcgttgccatccccgtggctgccggcgcactcttccccctcatcggcctgcagatgccgccatggctggctggtgcttgcatggccttctcgtctgttagtgtagtatgttcctcgctgctactgaggagatatagaaaaccaaggcttaccaccgtcttacagataactgtagagtgattcccgcctgtttatgtgtgcgacatttctatttgaaagaaatgcacatggcatctgtttgtaatcaagtgatgataccgtttttgacacttgtgcttgtaaatagcatataccc

SEQ ID NO: 4872 - DNA, 3917 bp, Hordeum vulgare subsp. vulgare
gggtcggtctccccttcacaattcacatttccccttcccgttcattcccctccgaactattgcctcgcctcgcctcgcctcgccacccccgtctctgacggccatggcccacctccagcttacggcggtcgccggcggccgcgacgacgagatggaggaggtggcgctgctggggtcctacggcgagccggagggcctgagctcgcggactgggcaggaggaggaggaggaggaggacgcgggcatgcgccgggcccaggtgcgggtcacgggcatgacgtgctccgcctgcacgggcgccgtcgaggccgccctctccgcccgccgcggcgtccggagcgccgccgtgtcgttgctgcagaaccgcgcccacgtcgtgttcgaccccgcgctcgcaaaggtttggttccgcgtgatccctccccctcccgctccctccatcgcctccgcgcgcgctggagatttggtctgggatcgcgcccctgcggtgaattctggtgcggtggcttcgatactggaggattatggcgcccttgttggtaatcggacgcggaattggggagctcaaggcgggaaacttcgctgcgttttgtcggttatggtggttaggatgcgcaatgaaacactcacaactcgtgcggtagctgcttcattttggctcgcttgtcctccggctgttccaattgatcagtcgtgtgggttgagtttgtgggacgctctaccttgctttgtcgggaagcaagtctagcgagtttggtaatcatatggattctaaccacgtttacgaaaaaatattgggagattttcatagtaccaattgcaaagctgcagccctagtgctggttcataaccattttctaggaagacttgacagactcgtagtaacttgcttaaccggttcccgaacagccccatgaagcacatgtaccgtgactcgcaattgcaaacaacctctacgaaaatgtgatgttaggtctgcttcaaagatctcaactctccatgacgttgccaacctgtaaccttgcttatttaaaccaatttgcttttacattgaggtttctgaaatggacctgacagtgtttgttgtattcaggaagaagacatcgtagaagcaatagaagatgctggatttgaagcagagatcctcccagactctgctgtttctcagccaaagtcacagaaggctttgtcaggccaatttaggatagggggcatgacttgtgctgcctgtgtgaactcagttgaagggatcttaaagaagttgccaggtgtaaacagagcagttgttgcattagcgacctcattaggggaagtcgagtacgatccggctgctattagcaaagatgagattgttcaggctatcgaggatgctggttttgaagctgcactgttacaaagtagtgagcaagataaggctttattaggtttgataggattgcatacagagagagatgtaaatttattatatgatatcctgagaaaaacagaaggcctgcgccagtttgatgtaaattctgtaagggcagaagttgaaattacattcgatccagaagtcgttggtttgagatcgattgtggatattattgagattgaaagcagtggcagactgaaagcccatgtacagaacccatatgtacggtcttcttcaaatgatgcgcaagaggcttcaaaaatgcttcacctccttcgctccagcttattcctaagtattccagtgttttttatgcgcatggtgtgccctcacatatctttcattaactcattcctactcatgcactgcggaccatttcgtataggagatctgctcaagtggatgctggtgagcgtagtacagtttgttgttggcaaacgtttctacgtcgcagcttatagggcccttagacatggctctacaaatatggatgtattggttgttcttggcacaactgcgacatatgtatactcagtttgcgcgcttctttatggtgcattcactggatttcatcctccaatgtattttgagacaagcgcaatgataattacatttgtgctattggggaagtatcttgaggtgcttgctaaaggacggacatcagatgcaattaagaaacttgtagagctggttcctgctacagctatcttgcttctgaaatacaaagatggaaaatatgctggagagaaggaaattgatgcattgttgatccaacctggtgatgtcttaaaagtgcttcctggctcaaagattcctgctgatggtatcgtcacttggggtacaagccatgttgatgaaagtatggtaactggtgaatctgcgtctatctccaaggaagtatctagttcagtaattggaggcaccatgaacctaaatggcacccttcacatacaagcggcgaaagtaggatcagggacagttttgagccagataatatctcttgttgagactgcccagatgtctaaagcacctattcagaagttcgctgattacgtggccggcatttttgttcctattgtcatcaccttgtccttactgacattctgtacatggtttgtatgtgggacgctgggggcatatccaaattcatgggtttcagaaactagcaattgctttgttttctccctcatgttctccatctctgttgtggtaattgcctgtccatgtgctcttggtctggcgacaccaactgctgttatggtagcaactggagttggtgccaatcatggagtacttgtaaagggtggagatgcactggagagggctcagaatgttaaatatattatatttgataaaactgggacactgacacaaggaaaggccactgtaacaacgacgaaagtgttctcaggaatggatgttggcgacttcctcacattggtagcatctgcggaggcaagcagtgagcatccacttgcaaaagctatcttggattatgcatttcatttccatttctttggcaaactcccctcatcaaaagatgatgttaagaaaagaaaagaagacgcattctctcaatggctcttggaagttgctgatttttctgccttgcctggcaaaggagttcaatgtttgatcaatgggaagatgattctggtgggcaaccgtgctttgatatctgaaaatggggttaacattcctgaagaggctgaaagtttcttggtagacatggaattgaatgcaaagacaggcattcttgtagcatatgatggcgacttcattggattaatgggggtaactgatcccttgaaaagggaggctgctgtagttatacaaggcctaaaaaagatgggcatttatccagttatggtgacaggggacaattggaggactgcactggcggttgcaaaggagattggaattgaagatgtgagagcagaggtcatgcctgctggaaaagccgacgtaatccgctctttgcagaaggatgggagtgtggttgcaatggttggagatgggatcaatgattcccctgccctagcagcagccgatgttgggatggccatcggtgcagggactgacattgccatcgaggcagcagattatgtgctggtgcggaataaccttgaagacgtcatcacggcgattgatctctcaaggaagacattcagccgaatccggtggaactacttctttgccatggcttataacatcgttgccatccccgtggctgccggcgcactcttccccctcatcggcctgcagatgccgccatggctggctggtgcttgcatggccttctcgtctgttagtgtagtatgttcctcgctgctactgaggagatatagaaaaccaaggcttaccaccgtcttacagataactgtagagtgattcccgcctgtttatgtgtgcgacatttctatttgaaagaaatgcacatggcatctgtttgtaatcaagtgatgataccgtttttgacacttgtgcttgtaaatagcatataccc

SEQ ID NO: 4873 - DNA, 3265 bp, Zea mays
cgtccccacaatttccgctcccctcacgagcatttcccccgcctacccgtcgccgacggccatggcccacctccagctcacggcgctcgccggcggcgccgacgacgagatggaggaggtcgcgctgctgggatcctacgacgaggaggccggggtggggccggaggcggagggggaccgggcggaggccggcatgcggcgggtgcaggtgcgcgtaaccggcatgacgtgctccgcgtgcacgggagccgtggaggccgcgctctccgcccgccgcggcgtgcgccgcgccgccgtgtcgctgctccagaaccgcgcccacgtcgttttcgaccccgcgctcgccaaggaagacgacattgtagaagcaatagaagatgctggcttcgaagcagaaattcttcctgactctactgtttctcagccaaaaccgcataagactttgtcaggacaatttaggataggggggatgacttgtgctgcatgtgtgaactcggttgaggggatcttaaaaaaattgccaggtgtaaaaggtgcagttgttgcattagcgacctcattgggtgaagttgaatatgatccttctgccattagcaaagatgaaattgttcaggccatcgaggatgctggttttgacgctgcactgttgcaaagtagtgaccaagacaaggtcctattaaatgtccaggggttacatttcgaggaagatgtagatgtattgcatgatatcctgaagaaaatggaaggcttgcgtcagttcggtgtaaattttgcaaactcagaagttgacattgtatttgaccctgaagtagttggtttgagacagattgtagatactatcgagacggagagcaacaataggctgaaagctcatgtacaggatccatatatacgagctgcatcaaatgatgcacaagaggcctctaagacgcttcatcttcttcgttttagtttattcctaagtattcctgtatttttcatccgcatggtatgccctcgcatacctctgattagttcattcctacttatgcactttgggccatttcgtataggagatctgctgaggtggattctggtgaccatggtacagtttattgttggcaaacgattctatgttgcagcgtatagggccctaagacatggctctacaaatatggatgtcttagttgttattggcactactgcttcatatgtctactctgtttgtgcactactttatggggcattcactggatttcatcctccaatatattttgagacgagcgcaatgataattacatttgtgctatttgggaagtatcttgaggtgctcgcgaaaggaaagacatcagatgctatcaagaagcttgtagagcttgctcctgctacagctattctacttctgaaggacaaagagggaaaatattcaggagagaaggagattgatgcgtcgttagtacaacctggtgatgtgttaaaagtgcttcctggttcaaaggttcctgctgatggtatcgtcatttggggtacaagtcatgtcaatgagagtatggtaactggtgaatctgtaccaatctccaaggaagtatccagtctagtcattggaggcacaatgaacttgcatggtgttcttcatatacaagcgacgaaagtaggatctggaacagttttgagccagataatttctctcgtggaaaccgcccagatgtctaaggcccctattcagaagtttgctgattatgtagccagcatttttgttcctattgtcatcaccctgtccttcttgacattccttgcatggtttctatgtggatggttgggagcatatccaaactcatggtctgctgaaagtagcaattgctttgttttctccctaatgttctccatatctgttgttgtgattgcttgtccatgtgctcttggtctggcaacaccaactgctgttatggtagcaactggagtcggggctagtcatggagtacttgtaaagggcggagatgccctggagagagctcagaatgtgaagtatgttatttttgacaagaccggaacactgacccaaggaaaggctactgtaactgcaacaaagattttttcaggaatggatctgggtgactttctcacgttggtagcgtctgcagaggcaagcagtgagcatccactggcaaaagctatcttggattatgcattccatttccatttcttcggcaatcttccctcaggaaaagacagcatcaagagaagaaaagaagagatactttctcagtggcttctggaagtcgtggactttgctgccttgcctggcaaagggattcaatgttggatcaatgggaagaaagttttggtagggaatcgtgctttgataactgaaaatggggtaaacattcctgaagaagctgaacgtttcctggtagacatggagctgaatgcaaagactggtattctcgtagcgtatgatggtgacttcattggcttagttgggataaccgatcctttgaaaagggaggctgctgtggtcatacaaggtctaaaaaagatgggtgttcatccagttatggtcactggggataactggaggactgcacgagcagttgcaaaggaggttggcatcgatgatgtcagagccgaggttatgccggctggaaaagccgatgtaatccactccctgcaaaaggatggcagtgttgtcgcgatggtcggagatggcatcaacgactcgcccgcccttgctgccgccgatgtcggcatggccatcggcgcaggcactgacatcgctatcgaggcggctgactatgtgctcgtccggaacaacctggaggatgtgatcacggctattgacctctcacggaagacgttcatccggatccggtggaactacttctttgccatggcctacaacgtgatcgccatccccgtagctgctggcgcgttgtttcccttcaccggggtccagatgccgccttggttagccggcgcgtgcatggcgttctcgtccgtcagcgtggtgtcgtcgtcgctgctgctgaggaggtataggaaacccagactcaccaccgtgcttcagataacagtggaataagttccttttttttttggcaatttgttgtatctcactttatcggagagaaatagatacaaacgtgaatgttggtgtggacgtgcggtgcagtactgagagtcaaacacagaaacacttgtacatatcgaacagtttgcaattgcaaccgagttatacatgttaactatgtgagggatcaagagacatgcgacaagacaattctagttt

SEQ ID NO: 4874 - DNA, 3093 bp, Oryza sativa Japonica Group
atggcccatctccagctcacgccgctcgccgccggcggcggccgcggcggcgccgacgagatggaggaggtcgcgctgctcggccccgaatcctacgacgaggaggcggcggcggcgccggggccggaggaggaggaggggatgcggcgggtgcaggtgcgggtcacgggcatgacgtgctccgcctgcaccgccgccgtcgaggccgccgtctccgcccgccgtggcgtgggcggggtcgccgtctcgctcctccagagccgcgcccgcgtcgtcttcgaccccgcgctcgccaagtgttgtaacttggaaacttgcaattgcaaacagtctccctacaatgaagaagacatcatagaagcaatagaagatgctggattcgaggcagaactactcccggactctactgtttctcagcccaagctgcagaacactttatctggacaatttaggataggggggatgacatgcgctgcatgtgtgaattctgttgagggtatcttgaagaaattgcctggtgttaaaagagctgttgttgcattagcgacctcattaggggaagttgaatacgatccttctgtcatcagcaaagatgaaattgttcaggctattgaggatgctggttttgaagctgcactgttacaaagtagtgaacaagacaaggttttgctaggcttaatgggattgcatactgaggtagatgtagatatattgcatgatatcctaaaaaaaatggaaggcttgcgtcagttcaacgtaaatttggtactctcggaagctgaaattgtatttgatccagaagttgttggtttgaggtcaattgtggataccatcgagatggaaagcagtggcagactgaaagcccatgtacagaatccttacatacgggctgcttcaaatgatgcacaggaggcctccaaaatgcttcatcttctttgctctagcttattcctaagcattcctgtattttttattcgcatggtatgccctcgcatacacttcactcgttccctcctactcatgcacttgggaccattttatataggagacttgttgaagtggatactggtgagtatagtacagtttggtgttggcaaacgattctatgttgcagcctatagggccctgagacatggctctacaaatatggatgtactagttgttcttggcaccactgcatcatacgtctactctgtatgtgcgcttctttatggtgcattcactggatttcatcccccgaaatattttgagacaagtgccatgataatcacatttgtgctatttgggaaatatcttgaggtgcttgctaaaggcagaacatcagacgctattaagaagcttgtagagctggtccctgctacagcacttttgcttctgaaagacaaagaaggaaagtatgctgcagagaaggagattgatgcatccttaatccaacctggagatgtcttgaaagtgctcccaggttccaaggtacctgctgatggtactgttgtttggggtacaagtcatgttgatgagagtatggtaactggtgaatctgcacctatctccaaggaagtatccagtatagtaattggaggcacaatgaatttacatggaatcctccatatacaagcaactaaagtaggatcagggacagtcttgagccagataatctctcttgttgaaactgcccagatgtctaaggctcctattcagaagttcgctgattatgtggctggcatttttgttccaatagttgtcaccttgtccttggttacgttcattgcatggtttctttgcggatcgttgggagcatacccaaattcatgggttgatgaaactagcaattgctttgtcttctctctcatgttctccatctctgttgtggtgatagcctgcccatgtgctcttggtctggcaacgccaactgctgtcatggtagcaactggagttggggctaatcatggggtacttgtaaagggtggagatgcactggagagggctcagaatgtgaaatatgttatatttgataaaactgggacactgacacaaggaaaggctaccgtaacatcgacgaaggtattctcaggaattgatcttggagacttccttactttggtagcatctgcagaggcaagcagtgaacatccacttgcaaaagctatattggattacgcatttcatttccatttctttggcaaactcccctcatcaaaagatgacatcaagaaaagaaaacaacagatattatcccagtggcttctggaagtagcagaattttctgccttgcctggcaaaggggttcagtgtttgatcaatgggaaaaaaatcttggtgggaaatcgtactttgataactgaaaatgggataaatattcctgaagaagctgaaagtttcttggtagacctcgaactgaacgcgaagacaggagttcttgtagcatatgacagcgaactcattggctcaattggaatgactgatcccttgaaaagggaggctgttgtagttgttgaaggcctaaaaaagatgggcatctatccagtaatggttacaggggacaactggaggactgcacaagcagttgcaaaggaggttggcattgaggatgttagagctgaggttatgcctgcgggaaaagctgatgtcgtacgttctctccaaaaggatgggagtgtcgttgcaatggttggggatggcatcaatgactccccagccctagcagcagctgacgtcggaatggccattggtgcaggaacagacattgcaattgaagcagcggactatgtgctggtgcgaaacaaccttgaagatgtcatcacagcaattgacctctcaaggaagacgttcagccgaatccgatggaactacttctttgccatggcgtacaacatcatcgctatcccggttgctgctggagcactcttcccattcaccggcctccaaatgccaccttggctggctggtgcttgcatggcgttctcatctgttagtgtagtatgttcctctctgtggttgaggagatacagaaaaccaaggctcacaaccctgttacaaataactgtagagattttgttgacagatagaacttataccagaacttctgcggcttaa

SEQ ID NO: 4875 - DNA, 3159 bp, Hordeum vulgare subsp. vulgare
gggtctccctcccccccacgaaaatattcccacctccgtcgcccgccctccccccccccttcctcctctgacagccatggcccacctccagctcgcggcggtcgccgggggcggccgcgcgggcgacgacatggaggacgtggcgctgctgggatcctacgacgaggagacgggcggagcggcgccggcgggaggcggcggcggcgcggaggacgaggaggaggcggaggcgcacgtgcgggtgacgggcatgacgtgctccgcctgcaccagcgccgtcgaggccgccgtctccgcccgccgcggcgtccggcgcgtcgccgtgtccctgctccagaaccgcgcccgcgtcgtcttcgaccccgcgctcgccaaggtcgaggatataatagaagctatagaagatgctggatttgacgctgagattctcccagattctgcagtccctcagtctaagtcacagaagacattgtcagcacaatttaggataggaggaatgacatgtgctaattgtgtaaactcggttgagggtatcttaaagaaacaacccggtataaaaggggcagtcgttgccctggcaacctcattaggagaagttgagtatgatccgtctaccattagcaaggatgaaatcgtccaggccatcgaggatgctggttttgatgctgcattcttacagagtagcgagcaagataaggtattgctaggcctgactggcgtccacgcagagagggatgcagatatactacacgatattctcaagaaaatggatggtttgcgacagtttggtgtaaatactgccctctcagaagttgagattgtgtttgatccagaggctgttggtctgcgttcaattgtggatgctatcgaaatgggaagcaatgggagattcaaagcacacgtgcagaatccttacagtcgaggggcttcgaatgacgcacatgaggcctccaaaatgctccatcttcttcgttctagcttattcctaagtattcctgtgttttttatacgtatgatctgccctagtatacctttcatcagtacattgcttctcatgcactgtggaccatttcatatgggggatttggtgaactggatattggttagcattgtacagttcgttattggcaagagattctatgttgcagcttacagagccttaagacatggttctacaaatatggatgtgttggttgttcttggcaccactgcatcgtatgtatattctgtttgtgcactactatatggagcattcactggatttcaacctcccatatatttcgagacaagtgcaatgataattacgtttgtgttatttgggaagtatcttgaggttcttgcaaagggaaagacatcagatgctattaaaaagcttgtagaacttgtccctgctactgctgttttgcttctgaaagatgaagaaggaaaatatgttggggagagggagattgatgctctgttagtccaacctggtgatgtcttgaaagtgcttcctggttcgaaagttccttctgatggttttgttgtttggggaacaagccatatcaatgaaagtatgataactggtgaatctgcccctatgcccaaagaagtatcgagtgtagtaattggagggacaatcaacttacatggcatccttcatatacaagcaactaaagtaggatccggaacagttttgagtcagataatatctctggttgaaactgctcaaatgtccaaagcccctattcagaaatttgccgattatgtggctagcatttttgttcctattgtcatcaccttgtccattctaacgttctccgtgtggttcttatgcggatcgtttggagcatatccacattcatggtttgacagaacaagcaattgcttcgtcttctccctcatgttttccatatctgttgtggtgattgcttgtccttgtgcccttggtctggcaacaccaactgctgtaatggtggcaactggaatcggggctaatcacggagtacttgtaaaaggtggagatgcattggaaagggctcaaaatgtgaattacgtgatctttgataaaacagggacactaacacaaggaaaggctgttgtaacaactgcaaaggttttctctggaatggaccttggagatttcctcacactagtagcatctgcagaggcaagcagtgagcatcctcttgcaaaggctgtattggaatatgcatttcatttccatttctttggcaagctcccttcctcaaaggatggccttgagcaaagaaaagagcagatattgtcgcaatggttgcttgaagctgaagatttttctgctgtgcctggcaaaggagttcaatgtttgatcaacgagaagaaagttttgattggaaaccgtgccttgatgaatgagaacggggtgagcgttcccccggaagctgaaagtttcttggtagacctggaactgaatgcaaaaacaggcattctggtggcatatgacagcagtttcatggggttgatggggatagccgatcccctgaaaagagaggctgccgtagtcgtggaaggactgaagaagatgggcattcatccagtgatgctcacaggtgacaactggaggactgcacaagctgtcgcgaaagaggttggcattgaggatgtgagagcagaggtcatgcctgccgggaaagccgacgtggtccggtcgctccagaaggacgggagcatagttgccatggtaggggacggcatcaacgactccccagccctcgccgcagccgacgtcgggatggccatcgggggcggcacggacatcgccatcgaggccgcggactacgtgctggtgaggaacaacctggaggacgtgatcacggcgatcgatctctcgaggaagaccttcaaccggatccgctggaactactttttcgccatggcgtacaacgtagtcgccataccggtggcggcaggcgcgctgttcccgatgacggggctccagatgccgccgtggctggccggcgcctgcatggccttctcgtcggtgagcgtggtgtgctcttcgctcctgttgagaagatacagaaaacccaggctcaccaccgtgctgcagattactatagagtagagcgatggcttttgtgattgtgaatagtgtaagtccccttcaccatttttacagaaaaggaaagaaaggaaagg

SEQ ID NO: 4876 - DNA, 3312 bp, Sorghum bicolor
atggaggatgtcgcgctgctcgactcgtacgacgaggagatggggctgccgccgctgggtgcatcgggcgcggaggagggcgccgcggcggaggcgcacgtgcgcgtcaccggcatgacgtgctccgcctgcaccagcgccgtcgaggccgccgtctccgcgcgcagcggcgtgcggcgcgtcgccgtgtcgctgctccagaaccgcgcccacgtcgtgttcgaccccgcgctgtccaaggtgctcctctcctcgcctcggtgtggcgtcttatgttttcaggtagaagatatcattgaagcgattgaagatgccggatttgaagcagaaattatccctgaatctgctgtctctcagcctaaatcacagaagactttatcagcacaattcaggatagggggaatgacatgtgccaattgtgtaaactcggttgagggtatcttaaaaaagctacctggtgttaaaggagcagtcgttgccttggcaacctcattaggggaagttgagtatgttccttctgccattagcaaagatgaaatcgttcaggccatcgaggatgctggttttgaagcagcattcttgcagagtagcgaacaagataaggttttgctgggactgactggcttgcacacagagagggatgttgaagtcttaaatgatattcttaagaaattggatggtttgcgacaatttggtgtaaatattgtcctctcggaagttgagatcgtatttgatccagaagctgttggtctgagatcaattgtggatacaattgagatggcaagcaatgggaggttcaaagctgatgttcagaatccatacactcgaggggcttcaaatgatgcacaggaggcctccaaaatgcttaaccttctccgctctagcttgttccttagcattcctgtatttttcatacgtatggtttgccccagtatacctttccttagtacactactaagcatgcactgtggaccatttctcatgggggatttgctgaagtggatattggtaagcattgtacaatttgttgtcggcaaacggttctatgttgcggcttatagggctgtgaggcatggatctacaaacatggatgtgctagtggttcttggtaccactgcatcatatgcatactctgtctgtgcactactatacggagcatttactggatttcatcctcccgtatattttgagacaagtgcaatgataattacatttgtgctgcttgggaagtatcttgaggtgcttgcaaaagggaagacatcagatgctattaagaagcttgtagaactggtcccttctactgctattttggttctgaaagacaaagaaggaaaacatgttggggagagggagattgatgcacggttggtccaacctggtgatgtcttaaaagtgcttcctggttcaaaggttccggctgatggtgttgtcgtttggggaacaagtcatgtgaatgaaagtatgataactggcgaatcagcacccatccctaaagaagtatcaagtgttgtaattggggggacaataaacttacatggtatccttcatatacaagcaacaaaagtgggatctggtacagttttgagtcagataatctctctggttgaaactgctcagatgtccaaagctcctattcagaaattcgctgattatgtggctagcatttttgttccaattgtcatcacattgtcaatagtgacattttctgcgtggtttttgtgtggatggttgggtgcgtatccaaattcatgggttgctgaaaatagcaattgctttgtcttctctctcatgtttgccatatctgttgtggtgattgcttgtccttgtgctcttggtttggcaacaccaactgctgtgatggtggcaactggaattggggctaatcatggagtacttgtaaaaggcggagatgctttagagagagctcaaaacgtaaagtatgtggtttttgataaaacagggacactaacacaaggaaaggctgttgtaacagctgcaaaggttttctcgggaatggacctaggagatttcctcacactggttgcatcagcagaggcaagcagtgagcatcctcttgccaaagctgttttggactatgcattccatttccatttctttggcaagcttccttcatcaaaagatggcattgagcaacaaaaagacaaggtattgtctcagtggctgcttgaagctgaagacttctctgcagtacctggcaaaggagttcagtgctccatcaacgggaagcatgttttggttggaaaccgttctttgatgactgaaaacggtgtgaccattcccccagaagcagaaactttcttgatcgacctggaatcgaatgcaaaaacaggcatacttgtggcatatgatggcgattttgtgggtttgatgggcataaccgatcccctgaaaagagaggctgctgttgtagtggaaggactaaaaaagttgggtgttcatccagtgatgctaacaggggataactggaggaccgcgcaagctgttgcaaaagaggttggtattgaggacgtgagagcagaggtcatgccagccggaaaagctgacgttgttcgcgccctccagaaggacgggagcaccgtggccatggttggggacggcatcaacgactccccagccctggcagcagccgacgtcgggatggccattggcgggggaacagacattgccatcgaggctgcggactacgtgctggtgcggaacaacctggaagacgtgatcaccgcgatcgacctgtccaggaagacgttcagccggatccggtggaactacttcttcgcgatggcctacaacgtcgtggccatccccatcgccgctggcgcgctgttcccgttcaccgggctgcagatgccgccgtggctcgccggcgcctgcatggccttctcgtccgtaagtgttgtgtgctcgtcgctattgttgaggaggtacagaaaacccaggctgacgactgtgctgcagataactgtagagtgattgtgaatactatatagctcccttaaccgtttttttgcagaaatgaaatggaaattgcgtcggaaatggtgccttctgtaaattgtagatttttttgtggggttttccatagccttctcatttctcaagttttctttttttacgatggtaccatggtatattcaacctcgtaattgtaaatctctctcgcgcgctgtaatacggaactcgggaaaaatgattggtacagatttattgggctggaaatgatatgtgaaacgaaatgttagttttgggcttttagcaaacgattatgcacttcttgtgggtgttggcgagttt

SEQ ID NO: 4877 - DNA, 1806 bp, Zea mays
gaaaaaccatcctcctcgctcgcactgacaggcaggcagagagagagagacagagagccgaattgattgccgagggcagagcagcaacagcaacagtccacgaccgatcgcccggcccgcgcgcaggcaggcagcagccatgaaccacctgacgccggcgctccacggggcgatgcggccgccctcggcgcaggggcaggggctggcccggtacggctccgcgccgggctcgctcctagccgccatcgccgactccgtcacccgcggcgaccccgcgccgccgccgccgccgcccgtgagccggttctactccgccgagtcctcggggctcacctcctgcgagtccagctgccgcaccgactgcggacgcccgcccctcgagcgggcgtacggcggctccggcgagatccgcgtgccgccgccgctgcagcagcagcagcaccacctgctggctccccccgcggcctccccgctgttccgccacagcagctcccccgccgggctgctctcccgtctcatgaccgacccgcacggaatggcggcgaccggaggagcgatggggagctacacgcaggcgggcagcgacgccgcgctgggccacggccacgcgcagctcagctcgcagtggagcttctccaggcaggacctgccgcagatctcggagatggggatgataccggccgacatcggggagagcatcgtgggcgccggcgggtgcaacagctccagcgacgccgcgcagtcctcctcctacctctccaggaccttctccgtcggctcctgggacgacaccaactccatcatgttctcgtctgccccctgcaagaagcccaaggtggaccccgccgccggcgccgacgacatggtcaccaacttcagcaccattgacccgcagttcggcctgtccaactcatccctggagctgcccggcatggacgactacctgcagctgcagcaggactccgtcgcctgcagagtgcgtgcgaggcgtggctgcgcgactcacccgcggagcattgccgagagggaaagaaggacgaggatcagcaagaggctgaagaagctgcaagaccttgtgcccaacatggacaagcaaacgaatacgtcggacatgttggaccttgctgtggattacatcaaagagctcaaggaccaagtcgagaagctaaaacacgaccaagcaaactgctgttgcctaggcaacaagagctgctgctgatgctggagaagcagacggaggagggtttttatgccgtaacaatgtgactgttaaaccagagctgttgcttcaggagaccaggccgcgggcagaagtgcgtgacatgtggagcggcttccatgactcagcttcctcttttcttggttgttccacggactagcgacccggccggtgccaacggcttgaagactaggagataacaagtaggacgatgttgtaatttagttaccgcgacgcggtggctctggcttgcgtgtaaagaagtcctccctttcaacgcgactgggattgctgttgctggtaaaattgttgtaggaatatcatctgcgctccatttttcatcgagctcatcttttttttttttttttttttgtgtgtgtcactggattttggcaagaccgtaactcagaaaccgagcactgatcgagcgttcatgccaccccatacgaagtccaagagaattttagtatgaccaaaaaaaaaaaaaaaaaaaaaaaaaaaaaaaaaaaaaaaaaaaaaaaaaaaaaaaaaaaaaaaaaaaaaaaaaaaaaaaaaaaaaaaaaaaaaaaaaaaaaaaaaaaaaattt

SEQ ID NO: 4878 - DNA, 1691 bp, Sorghum bicolor
ccgcgcccgcaccaccaccgcgcgcgcatccgcctccctcgcacagtcgcacgcaccgtccagtcaaaagtcctcgggacaggccaggcagggagagcagagcactagagcagcagcaacacaacacatcacgattcacgagcgatcgcccgcctactcgcggcagcagccagccatgaacctgaaccgcctgacgccggcgcaccacggggcgatgcgtccgccctccgtgcaggggcaagggctggcgcggtacggctccgcgccgggctcgctcctggccgccatcgccgagtccgtgacccgcggcgaccccgcgccgccgccgccgcccgtgagccggttctactccgccgagtcatcggggctcacctcctgcgagtccagctgccgcaccgacggcggcggcggcggacgtccgcctccgctcgagcgggcgtacggcggctccggcgagatccgcgtgcctccgccgccgcagcagcagcacccgctggcggcttccacgctgttccgccacagcagctcccccgccgggctgctctcccgcctcatggccgacccgcacggaatggccgcgaccggaggagggatggggagctacccgcaggtgggcagcgacgccgcgatgggccacggccacaggcagctcagctcgcagtggagcttctccaggcaggacctgccgcagatctccgagatggggatgatacccgacatcggggagagcatcgtcgccggcggatgcaacagctccagcgaaggcggcggtggcggcgcgacgcaggcgcagtcctcctcctacctctccaggaacttctccgtcagctcctgggacgacaccaactccatcatgttctcgtcccccagcaagaagcctaaggtggaccccgccgatgacatggtcaccagcttcagcaacatcgactcgcagttcggcttgtccaactcgtccttggagatgtccggcatggacgactacctgcagatgcagcaggactccgtcgcctgcagagtccgtgccaagcgtggctgcgcaactcacccgcggagcattgccgagagggaaagaagaacaaggattagcaagaggctgaagaagctgcaagatcttgtgcccaacatggacaagcaaacaaatacgtcagacatgttggatcttgctgtagattacatcaaagagctgaaggaccgagtagagaagctaaaacacgaccaagcaaactgttgttgcctaggagtagccaacaagggctgctgatgctggagaagcaggtcgacggaggagggtattatgtcgtaacaatgtgattgttaaaccagaattgttgcttcagaagatcaggctctgattgtcaaaccagaattgttgcttcacaagaccaggctcatgtcaagtggcttccataactcagcttcctcgttcttggttgtaccacggattagtgacttagtgtcgacggcttgaagactaggagatgacaagtaggctatcgtaatttaattactgtggtgcggtggcttatgtgtaaaaagtcctccctttcaacgcaattgggattgttgctgataaaattattgtaggaatatcatgggttcccatttttcactgagctaatttttgcagattactagattttgacacgaccgtaactcagaaccagtataaatgagcactgaacattcatgcc

SEQ ID NO: 4879 - DNA, 1228 bp, Zea mays
aaggaacggacgccgcctccgctcccgtcgcagtcgcagcacattcaccctacctcactcgccctccccaccctcccctccagaccctcacaccaccggcgccgcccgccctgtatggcmtactactcgggcggcggcaagctgtcggcggttgacgccatcctggcggaggcggcggacctggtggcgctcgagcaggtcgccaagctcaacacggcccacctcgacgacgactccgcgcttccgtccagcctcgaggcccgcttccgcaagctcaagtccctcccctcacccgccgcagtgccgcccgtcagcaccctcgcccgcagcgccaccgcgccgcgcccggcccccgctctgcccggccccgatcctcccgctcctgctccgcctgtgcatcacccggtccacgaagacccgccgccgggagacgcggagacgaagggcggcgggtcctcgccgcggcaggctcgcgccccggcacccgcacccacggtccacgccgacgacgccgaggacctagatcagctgttcgggtcggcgccgcgggggcggccgacgctgcgggagcggaacagggggagcgactcctcctccgtctccccctcgccgccgccgccgccgcgccaggcgtgctgcttcggcttctcccccaagaagcccctgcagagggcgccgtcggccaagggcaagaagaaggaggtccgccacgggtcccgcgacgtcctcggcgtcgacgccgacgagtggggcgacgagaacaggaggatcgccaccgagctcagggagcagcagcgccggctcaggaaggcgctggaggaccaggtgcaggtcagcagggagaccgccaagatggcgcgctgggtcaagcaggcgtccgcgcgcatgacgcacgccgaggccattgacgacctgctcagtgactgcgaggacgacctcaaatgagctcacgccgacgctttcctcgtcggttcttccactgtattgttggtgatcacaagtctgtcaaaaatgctcatatgttttcatgagtgcatttgcatccatgctttggtacaatgcttatacagaagaagcagagtcatgaaacaatgctatttcttttatgtcacatattattaggaccaggcaaagtatatgaatcgatggggcatataaggttttcttgaaaaaaaaaaaaaaaaaaaaaaaaaaaaaaaaaaaaaaaaaaagaaaaaaaaaaaaaaaa

SEQ ID NO: 4880 - DNA, 1127 bp, Sorghum bicolor
tctcccccccccctcccgatccacacccacagcctacatggcgcactactactcgggcggcgccggcggcaagctgtcggcggtggacgccatcctggcggaggcggcggacctggtggcgctcgagcagatcgccaagctcaacacggcccacctcgccgacgactccgcgctcccgtccaccctcgaggcccgcttccgcaagctcaagtccctaccctcggccgcagcgccaccgccacccgtcaggaccctcacccgcagcgtcaccgcaccggggcccgccgccgctctccccgaccccaaccctcccgctccggctccgcctgagcatcacctggcccccgcggtccacgaagatcctcctccgccgccgccgctgccgggagacgcggagacgaagtgcggcgggtcctcgccgcgtgaggctcgtgacccggcccccgcacccgcggtccacgacgccgacgccgaagacggcgccgacgacctggagcggctgttcgggtcagggccgcgggggcggccgacgctgcgggagcggaaccgggggagggattcctcctcctccgcttccccctcgccgccgccgcagcgccaggcgtgctgcttcggcttctcccccaagaagccgctggagaggacgccatcgtccaaggccacgaagaaggtccaccacgggtccggcgacgtcctcggcgtcgacgccgacgagtggggcgacgagaacaggaggatggccaccgagctcagggagcagcagcgcaggctcaggaaggcgctggaggatcaggtgcaggtcagcagggagaccgccaagatggcgcgctgggtcaagcaggcgtccgcgcgcatgacccatgtcgaggccattgacgatttgctcagtgactgcgaggacgatgaggagctcaaatgagatcacgccgcgccgacgccgctggttttgcctgtcgtgctcgctggttgttccaccgtcttgatgatgatcacaaatctgtcaaaatttcttatatgtttattagttctatatagaagaaacatattattaggatcaagcaaaatgtatgaactgatcgtgtatgtaaggattcggtgagtgttggtataggaatggagaacctgct

SEQ ID NO: 4881 - DNA, 1202 bp, Zea mays
atggcggccaacgtgggcgcgggcaggagtgctggcggcggcggagccggcactggcactggcactgctgctggcagcggcggcgtgtcgacggccgtgtgccgccctagcggctcgcggtggacgccgacgccggagcagatcaggatcctcaaggagctctactacggctgcggcatccggtcgcccaactcggagcagatccagcgcatcaccgccatgctgcggcagcacggcaagatcgagggcaagaacgtcttctactggttccagaaccacaaggcccgcgagcgccagaagcgccgcctcaccaacctcgacgtcaacgtgcccgtcgccgccgacgacagcgccgcccaccttggcgtcctctcgttgtcgccttcttcaggttgttcaggcgcggcgcctccgtcgcccaccctcggcttctacgccggcggcaatggctccgctgtgatgctggacacgagttccgattggggcagcgccgctgccatggccactgaggcatgcttcatgcaggactacatgggcgtgatgggcgggcgcgtcaccgtgggcatgctcctcctcctcgtcggaggacccgatggcggcgctggcgctgcgccgaaggtgacgcgggcgcccgagacgctccctctcttcccgaccggcggcggcggcggcggcggagacgatagccagcccccgcggccgcggcagccagtcccagcaggcagctaccttccattctggggtgccgcgcccaccccaactggcagtgccacttccgttgcgatccagcagcaacaccagcggctgcagatgcaagagcagtacagcttttacagcaacgcccagctgcccggcaccggcagccaggatgcagcagcaacatccctggagctgagcctcagctcctggtgctccccttaccctgcagggaccatgtgagagcagcgcgacgcaagctgccactgctctgaattctcgtcatggaactatggaaggagtagtggctagtgaccaactgaccatagtgttgctgtcattgtcctagctaggttcaatagctaccagttactactacgtactctagaagcatgtgtgaaggaaggcaatagtgtttggagatctctctagtactattagatagcgaatttgcaggcattaacatgcatgcacgttgccggctgggcttttagactctaaaaaaa

SEQ ID NO: 4882 - DNA, 984 bp, Sorghum bicolor
atggcggccaatgtgggcgcgggcaggagtgccgtcggcggcggcggtggtggtggagcgggtggcactggcactgctgctgccagcggcagcgtggcgacgacagcggtgtgccgccccatcggctcgcggtggacgccgacgcccgagcagatcaggatactcaaggagttctactacggctgcggcatccggtcgcccaactcggagcagatccagcgcatcaccgccatgctgcgccagcacggcaagatcgagggcaagaacgtcttctactggttccagaaccacaaggcccgcgaacgccagaagcgccgcctcaccaacctcgacgtcaacgtgcccaccgccgcagccgccggcgcggccgacgccagcacccacctaggcgtcctctcgctgtcgtcgccttcaggcgcggcgcctccctcgcccaccctcggcttctacgccggcaatggcggcgccggctcgaccgtgctgctggacacgagttccgactgcgctgccatggccactgagacatgcttcctgcaggactacatgggcgtgatgggcacgggcagcgcggccgccgcgtcgccgtgggcatgcttctcgtcgtcgaacactatggcggcggccgcggcacgggcaccgacggtgacgcgggcgcccgagacgctccctctcttcccgacgggcggcgacgacagccagccccggcggccgcggcacggagtcccagttccagttgcagcaggcgaggccatccgcggcggcagcagcagcagcaggtacctgccgttctggggtgccgcgcccacaactgccagtgccacttccattgggatccagcagcaacaccagctgctgcagctgcaagagcagtacagcttttacagcaacgccatgcccggcaccggcagccaagatgcatcagcagcatccctggagctcagcctcagctcctggtgctccccttaccctgcagggaccatgtga

SEQ ID NO: 4883 - DNA, 1988 bp, Zea mays
ctcactcctcagtctacactccacactccacactccacacgcaagcacgcacggcgggcggcggtcgcccacctggacctggtaccggaacaccagagctcaaggtcggccatggattcgccactgctgagcacacccgctctgctggcgctgtccctgctccttctagcgctctacatcgctcgccggcgccgcggcggtggcaagaaccggaactaccctcccgtggcgggcaccgtgttccaccagctgctccacttcaggcggctgatggagtaccagacggagctcgcccacaggtaccgcacgttccgcatgctcaccccgacctgcaactacgtgtacaccgtggagcccgccaacgtggagtacatcctcaagaccaacttcggcaactacggcaagggggcgatgatccacgacgtgatggaggacctcctcggcgacggcatcttcaacgtggacggcgccaggtggcggcaccagcggaaggtggcgagccacgagttctccacgcgggtgctgcgcgactacagcagcggcgtgttccgcgacacggccgcggagctcgctgggatcgttgcggtggcggcgcggggcgccgggcccggggagaggccgctggacgtcgcggacctcctgatgcggtcgacgctggactccatgttcaaggtcgggttcggggtcgacctgggctcgctgtccggctgcggcgacgacgagggcgcggcggcgttcgccagggcgttcgacgacgccagcgagcaggtcctgtaccgcttcttcgacccgtcctggaaggtcaagaggctcctcggtgtctcgtcggagggggccatgaaggggtcgatccgcaccatcgatcaattcgtgtacggcgtcatcgacaggaagatcaagcagatgggcagggaccaagaattcgccaagaaagaggacatcttgtcaaggttcctgatggagcgggagagcgaccccggctgcttcgacaacaagtacctgcgggacatcatcctcaacttcgtgatcgccggccgcgacaccacggcgggcaccctgtcgtggttcctctacgtgctctgcaggaaccagcacgtccaggacagggtcgcgcgggaggtgcgtgccgccgccacgggcgaccgcgacgacgtcggcgtgcaggagttcgtcacgtgcttaaccgaggacgccatcagcaggatgcggtacctgcacgcggtgcttaccgagacgctccggctgtacccggctgtgcccatcgatgtgaagtattgcttttcggatgacacgttaccggacggctacgctgtcaagaaaggtgacatggtgaactaccagccgtaccaaatgggcaggatgaagttcctgtggggcgcggacgccgaggagttcaggccagagaggtggatcaacgacgacggcgtgttcgtcaacgagagccccttcaagttcacggctttccaggcggggcctcgcgtctgcttgggaaaggagttcgcgtacaggcagatgaagatcttcgcagcggtgctggtctacgccttcaggtttgagatgtgggaagccaatgctaccatgggctaccggcccatgctcacgctcaaaatggacggcccgctgtatgttcgggcatcgctccggcaatgaggtgtgggcgactgggcggcggccacgaagtcaaaatacgttgcgtactgttatgatactatcttagatattaaacttgttaaaataaatattttattttatcttagctaaaagactgaaaataatacgagttgaagagaaactcaacctttttgttatagctcgctcgatctctcgtcatctttcaactagcgaaatggtattatatgaaagtgttgtactatgtatacgtgtgacttcctttcgtattagacctcggtagtatctggtagcctatctatgatgtaatgattgattaataagcgagaagagggaagagcaataaatctactcgtttc

SEQ ID NO: 4884 - DNA, 1938 bp, Sorghum bicolor
acgcaccacacaagtactgctaccccacacggccacaaccaaacgcgcacggctcccaggtcccagccgcctcgcaccgagacgcggacgccagcgctctccagtctcaactgaccatggactcgccgccgggccaacccacggtggtcaccctgatacttgctctcctcctagttctatacctcgcgctccggcgccgcgccggcgccggcggcgccaagaaccggagctacccgccggtggccggcaccgtgctccaccagctgttcaacttcggccgcctgatggagtaccacactgagctctcccgcaggtaccgtactttccgcatgctcaccccgagcagcagctacatctacaccgtcgagcccgccaacgtggagtacatcctcaagaccaacttctccaactacggcaaggggagcaaggtgcacgaggtgggcgaggacctcctcggcgacggcatcttcagcgtggacggcgccaagtggcggcaccagcggaaggtcgccagccacgagttctccacgcgggtgctgcgcgactacagcaccggcgtgttccgcgacacggccgcggagctcgcgggcatcgtggccgccgacgccggggagaaggtggacatgcaggacctgctgctgcggtcgacgctggactccatcttcacggtcgggtttggggtcagactgggcgttctctccgggtctagcaaggaaggcgccgcgttcgccaaggcgttcgacgatgccagcgagcaggtgttacaccgcttcttggacccgttttggaaggccaagaggttcctaaacttctcgttggagacggccatgaagcgctcggtccgcaccatcaacgacttcgtctacgccgtcgtcgacaagaagatcgagcagatgggaagagaccaacaagaatttgccaagaaagaggacatcctgtcgaggttcttggtggagcgggagagcgatcccggctgcttcgacaacaagtacctgcgggacatcatcctcaacttcgtgatcgccggccgcgacaccacggcggggacgctgtcgtggttcctctacgtgctgtgccggaaccagcacatccaggacaaggtcgccgaggaggtgcgcgccgccgccacctccggcgacggcgacctcggcgccccggagctcgtcgcgtgcctgaccgacgacgccatcggcaagatgcactacctgcacgcagcgctgacggagaccctccggctctaccctgctgtgcccatcgatgtcaagtgctgcttttcggacgacacgttgccggacggctacgccgtcaacaaaggggacatggtgcactaccagccgtaccaaatgggcaggatgcagttcctgtggggcgccgacgccgaggagttccggccggagaggtggctcgacgacggcggggtgttcgtccccgagagccccttcaagttcacggctttccaggctggccctcgcgtctgcttgggaaaggaattcgcgtacaggcagatgaagatcttcgcggccgtgcttctctacctgttcaggtttgagatgtgggatgccaacgccaccgtgggttaccgggccatgctcactctcaaaatggatggcccgctctatgttcgtgcgtcgctccggcggtgaggagggcggacggcaagcggcatataagatgcctcaagtcaaacggccagtcgtgtggaagtatacatgcgtgtagctatgtacttgctgtatatcggtcttgtataggatatatgcacttgctgtatatctattataaagtcaatgaccggctgaccgttgttttctttaacatttacaagtcggtcagacacgtctgtgtatccgccgtcctctttgtgtactttttttttgaaagatctggaaccatggtttccagcgtgtatattaataataagaagagaatgatccattt

SEQ ID NO: 4885 - DNA, 1903 bp, Oryza sativa Japonica Group
gggccaaaataccggaccacaagcagtaactggaagtggatcaacatcatccgtctgctatagtctactagtacttgcattgcggggagggagacacctattctgctaagctgcccacggccatggagtcgccgctgagccatccggcgatggtcgccttgtcgctgctgctactcgtggcgctctacctcgcgcgccgcgccgtgctggggaagaaacgcaggtatccgcccgtggccggcaccatgttccaccagctgctcaacttcggccgcttgctggagtaccacacggagctctcccgcaagtaccgcaccttccgcatgctcaccccgacctgcaactacgtctacaccgtcgagccggccaacgtcgagcacatcctcaagaccaacttcgccaactacggcaagggcccgatgacccacgacgtgctggaggacctcctcggcgacgggatcttcaacgtggacggcggcatgtggcggcagcagcgcaaggtcgccagcctcgagttctccacccgtgtgctgcgggactacagcagcgccgtgttccgcgacaccgccgcggagctcgccggcatcctggagcgtggtccggcggcgaaggggcgggagagggtggacatgcaggatctgctgatgcgggcgacgctggactctttcttcagggttggtttcggggtcaaccttggcgtgctctccggatccagcaaggagggcttggtgtttgccagggcgttcgacgacgcgagcgagcaggtgctgttccgattcttcgacctgctctggaaggtcaagaggtttctcaacatctcgtcggaggcaaccatgaagcagtcgatccgcaccatcaacgacttcgtgtactccatcatcgacaggaagatcgaacagatgagcagagagcaacacgaattcgccaagaaagaggacatactgtcgaggtttctgctcgagagggagaaggatcccggctgcttcgacaacaagtacatcagggacatcatactcaacttcgtcatcgccggccgcgacacgacggcggggacgctgtcgtggttcctctacgccgtctgcaagaaccagcgcgtacaggacaagatcgcgagggaagtgcgcgacgccaccaccggcgaccgcgacgtcggcgtccaggatttctcttcatttctgacagaagacgccatcaacaagatgcagtacctacacgcagcgttgacggagacgctccggttgtaccctggcgttcccctcgatgtcaaatactgcttctcggatgacacgttgccggacgggcacgcggtgaagaaaggagacatggtgaactaccaaccgtaccccatgggcaggatgaagttcctgtggggcgacaacgccgaggagttcaagccggagcggtggctcgatgacagtggtatgttcgtcgccgagagccccttcaagttcacggcgttccaggcggggccacgaatctgcttggggaaggagttcgcgtacaggcagatgaagatcgtttcggctgtccttctctacttcttcagattcgagatgtgggatgacgacgccaccgtgggttataggccgatgctgactctgaaaatggatggcccgttctatctccgcgcattggcccggtgaagcttcacaccatatcaaaagttcaaaactcaagggcggcgctggtctatttcatccattttggcggggataatgacggttagatatggttgtcgaagacaacagtgctcctaaggtgtaggtatgtaagaaaaataacgtgtgtattatactcttaaaaactttttactagagggctatgtgtactccctccgttccacgtaataagacacgatcaaacatgacaccatcatcaaaattaatctgactttaaatttatc

SEQ ID NO: 4886 - DNA, 1734 bp, Zea mays
ccacggtgttctccctgatacttgctctcgttctagtgttatacttggcgctccggcgccgcggcggcggcaagaaccggagctacccgccagtggctggcaccgtgctgcaccagctgttcaacttcggccgcctgatggagtaccaaaccgcgctctcccgcaggtaccgtaccttccgcatgcttaccccgacctgcagctacatctacaccgtggagcccgcgaacgtggagtacatcctcaagaccaacttcggcaactacggcaaggggagcacgctgcacgagctgagcgaggacctcctcggcgacggcatcttcaacgtggacggcgccaagtggcggcaccagcggaaggtcgccagccacgagttctccacgcgggtgctgcgcgactacagcaccggcgtgttccgcgacacggcggcggagctcgcgggcatcgtggccgccgccgccgccgcgggggagaagctggacatgcaggagctgctgatgcggtcgacgctggactccatcttcaaggtcgggttcggggtcaacctgggcgtgctgtccgggtccagcgaggaaggcgccgcgttcgccaaggcgttcgacgacgccagcgagcaggtgctgcaccgcttcttggacccgttctggaaggccaagaggttcctgaacttgtcgtcggaggcggccatgaagcgctcgctccgcaccatcaacgacttcgtctacgccgtcgtcgacaggaagatcgagcagatgggaagagaccaacaggaatttgccaagaaagaggacatcctgtcgaggttcctggtggagcgggagagcgatcccggctgcttcgacaacaagtacctgcgggacatcatcctcaacttcgtgatcgccggccgcgacacgaccgcggggaccctgtcgtggttcctctacgtgctctgcaagaaccagagcatccaggacaggatcgcgcaggaggtgcgcgccgccacctcgggcgacggcggcggcctcggcgctccagagctcgtcgcgtgcctgaccgaggacgccatcagcaagatgcactacctgcacgcggcgctgacggagaccctccggctctacccttccgtacccatcgacgtcaagtgctgcttttcggacgacacgttgccggacggctacgctgtcaagaaaggggacatggtgaactaccagccgtaccaaatgggcaggatgcggttcctgtggggcgcggacgccgaggagttcaggccggagaggtggctggacgacgccggcgtcttcgtccccgagagccccttcaagttcacggctttccaggcgggccctcgcgtctgcttgggaaaggaattcgcgtacaggcagatgaagatcttcgcggctgtgcttctctacctgttcaggtttgagatgtgggatgccaacgctaccgtgggttaccgggccatgctcaccctcaaaatcgatcgcccgctgtatcttcgtacgtcgctccggcgatgaggtgaggcgggcggcatgcctcgtgtcaagcggtcagacacgtctgtgaatttaggaaaacaacatctccaaacatccgcatagtcttcgggccacgattggcccttttagaaattggtatgttgacatgtgattgtactgacccttgccaccggcgcaccccgaacagcgagacgtacgcgagacggtagtagaaccggaagaagatcacggtggggagatagaaactgac

SEQ ID NO: 4887 - DNA, 1462 bp, Zea mays
cggatgagtgccgctgcactggtggcgatccagctgggagcgagaggggcgcaagcaggaagaccgagatggcggcggcggggccgaggagggccggcgcccggttccttctcgcgcggggcatcgggagcagcgtcgcccatgtgcattccttgggccgcggcggcggcggcgttacaatgccgcgcgcgttgctggcggactcggcgcccgcgtccgcgccggcgatgaccgggagggccccgcccgcggcctcgtcgtccgcctccgccgcggcgtcgaggatcacgccggcggtgctgttcgtcacggtggtcctggccgtggtgctgctcgtctccggcctgctccacgtcctgcgccgcctcttcctcaagagccaccacgccggcgccggcgccggggagcgccacctgcagcacctcttcttccccgcgcacgacgacggcgcgggcgccggctccgggtccggctcaggcgcaggcggcggcggcggcctcggccaggacgccatcgacgcgctcccggagttcgcgtacggggagctgtccggaggaggcgccgccgccgccgcccccgcaagcaggaagggcaaagagaaggcggccgggccgttcgactgcgccgtgtgcctctccgagttcgcggaccacgaccgcctccgcctgctcccgctgtgcggccacgcgttccacgtggcctgcatcgacgtctggctccgctccagcgccacctgcccgctctgccgcaccaagctctccgcgcgccacctcgtcgccgcagccgcggacgcgccagcgccagcatccgtcgccccggacgtcggggagcagaggccgcagcgggaccaggcgccagaagccgccgaggccgccagcagcagcgtcgtgctcccggttaggctcggccggttcaagaacgccgacgccgaatccgccgaggccgagtccagcaacggcggcgccaccagccgcgtcgagcggcggaggtgctactcgatgggctcgtaccagtacgtgctcgccgacgagcacctgctagtctccgtgcacctgcggcacggcaccagcgccgccgtagccgcctcgagcggcgtcgacggcgacgaccggcagcagcatcagggcaagaaggtgttcgcgcgcggcgacagcttctccgtgtccaagatctggcagtggcgcggcagcaagcggctgccgggcgccctctgcgccgacgacggcctgccgtgggcgccggccaaggacgatcgcgccagcgcctgcacgaagcaacgcggcgacacttgatcattcattcacacggtagtagacagacagacagccgacacacacacatgtatgtgtctagcttctcctttttttttcgctagcggcttggtagaattttgggtgatcttgatccgaatccttctgtacaatatatgtgtttcattcaggatatcgtagtttcatgagtc

SEQ ID NO: 4888 - DNA, 2008 bp, Sorghum bicolor
aagcgaggacagcagcccaaccccaaccccgacctgccgagcgccggctgccgctgcgcaccaccaccagcacaggcacgagacagcgcttcagctcacatgccgcggcggccggcaccgcatttccaaagcccggggcgggccgggggcctcgccctcgcgcaatagacaacgcctctccaaccgcagcacggccacggtcacctagcctacaaccaaatacccggctgcgcgcgacgagcgagttggtaccagcgactgcgagcgccatatatcatatatccatccaaagcttcggtccctggttgacttgcttgctgcttccttccttgtccattggccatggcttccttgtcccggtttggtgcctgattgctcgacctcacctgatacatcgctccgccgtctatatagctgctgcctacaccggccggacagcggatgagtgcggctgcactggtgccgagccagggaccgagaccggcggcgagaggggcaccagcaggaaggccaagatggcggcgggactgaggagagccggcggcaggtttcttcttgcgcgggaaatcaggagcagtggcgctggcgccaatgtgcacttcttcggtgccagaggcggcgttacaatgccgcgcgcgttgctggaggatccagcgcccgcgccggcgatggacgccaccgccacgacgaccgggagggggtcgccgccgtccgcctccgtctccgccgcggcgtcgaggatcacgccggcggtgctgttcgtcacggtggtcctggccgtggtgctgctcgtctccggcctgctccacgtcctgcgccgcgtcttcctcaagagccaccacgccagcgccggcgccggggagcgccagctgcagcacctcttcttccccgcgcacgacgacggcggcgccagcggctccggaaccggcggcggcggcctcggccaggctgccatcgacgcgctcccggagttcgcctacgccgagctgtccgggaccgccgccgccgccgctagcaggaaggggaaggagaaggcggcccggccgttcgactgcgccgtctgcctctgcgagttcgcggaccacgaccggctccgcctgctgccgctgtgcggccacgccttccacgtcgcctgcatcgacgtctggctccgctccagcgccacctgcccgctctgccgcaccaaggtctccgcgcgacacctcgccgcagccacggacgcgccatcgtccgtcgccacggacgtcgaggagcagaagccgcagcaggaccaggcgccgccagacgccgtcgaggccgccagcagcagcgtcgtgctcccggtcaggctcggccggttcaagaacgtcgacgacgacgccgagtccagctccagcaccggcgccaccagccgaatcgaccggcggaggtgctactccatgggttcgtaccagtacgtgctagccgacgagcacctgctggtctccgtgcacctgcggcacggcaatgcgggcggcggcgccggcaccgcgtgcggcactagcagcagcgccgcagtaaccgcggcgagcagtagcgacgagcagcaccagggcaagaaggtgttcgcgcgcggcgacagcttctccgtgtccaagatctggcagtggcgcggcagcaagcggctgcccggcggcctctgcgccgacgacggcctgccgtgggcgccggcggccaaggacgatcatgccagcgcgaacacgaggcaacacagcgacacttgatcatacagtagtagacaggcaaccgacacacgcgcatacacacatgtatgcctagcttcaccttgttgactagctagcggcttggtagaattttgctggtgaaatcattctacgaacgaccagtcatgcaaaaatacaaaaaaaaatatttttgggtgatcttcatctggatcattttgtgccatattactgtatttcaatttcatgactgacgttaatcccagcaggctggctggcagtgcagaacacacacacataaagcccat

SEQ ID NO: 4889 - DNA, 1455 bp, Sorghum bicolor
atgtcggcctccggcgaccccctggatgccctcccggcggcggtcctcgccgacgtcctgggccgcgtcgccgacgccggcgacatcgcggcttgccgcctcgcctcgcgggcgctcctcgccgcgtcctacctctgcccccgcgtccgcctctgcgccgccgactgcgcccgccgccggtgcgagggcgggggcggtttccccgcgttctgcgcgacgactgcgaacctcgcctcgcttctcgggcctcacctccggtccctgcacctcaccagcggcgaggccgtggcggcgtgggcggctacctccacggcagcggttctccgggagcttgagatcgctgactactggccgcaggcgtgctggcggaaggcggaggcgctcccactcatctcacactactgtcaaaatctcgtcaagttgggacttaaaaatgcatggctttctgttgaggggctcaagaaaatgccaaatctgactcatctgacgcttgagttcattaggttggatgatgaagatctcaaccaattgaatgagtgcttcccttgccttcacactcttaatcttataggagtcggagggctcaaggaccctaagattgaccttcttcatctaaaggcttgccgctgggaggtatcaaatgtcccacggtctttggttgtccgtgcgccagacttggtttttctggagttgaaatgtatccgaccagatacactcattttggatactccgtccttgtctactctgaaactgaccattgataaacttggtgcaaatgtccgagttgatggtcttctgcgtttgacaaatcttcacatagaatcactggattttagttccctttttctagtattcatagacaatcgaggtatcaggacattggagcttgagctacctgagtttgcaagtcaatatgaacttcttgaagcagtgaacccagattatcttctgaaaatgcttgccagcattagtgaagtcaagctggctccgagattctcatgtgaactgaaactatgtctcgccctatgcaaaggtagtcagtttggaagttgcctgaagaagctcctaattcatgtgccgcaaccagggagctgttctcatctcttgcccttgtttgagatttgtgcacctttgtgtgaggtgactgtccttttccacactgaatcagctgatgctgtccgtcaaggtgcaatctcaatttgtatgcaaaactttccagatatcagatggcagtggggtacctggcagtagtaatcctgtctatatatgcttataggcaagtttgagttacataactaaactatctgcgtgactgataatttgtacttttgttaacatagcagccccttctacacaattgggagctggcttgtttgctgacatacactgtgcactaacattgtaaggagcaaattacctggttgtgtctctgtttcatctatactatattactat

SEQ ID NO: 4890 - DNA, 1638 bp, Zea mays; identical to SEQ ID NO: 1127

SEQ ID NO: 4891 - DNA, 1678 bp, Zea mays
aacaaccaacccaccacaagtcgcaattcacaccagcgcgacgacaggaagaagagtttctccgccgcagtcgccgaaccacccggtgccgaggccctaggcgcgcttgcttccccgccgccagcatggcaccgaagcgcccggccgccgcctcggggtcggcgtccgaggcatccgacgcggaggcggacgcgggccaccaccagccatcatccccgtctccgtccaagacgccgccgccgcccaaccctaaccctaagtccaccgccgctggccccacctcggcggcggaggactccaccgcggctggatccggctccgaggccgcctacgactctgacgcggaccaccgcaccgcgccccgtaacgcggcgtcgccctcgagcaagcccaggagcaccaggccgcgctcgcgctcccgctcccgctccccggacgccgcctcgtattccgacggcgtggcctcagacgctgacgccgacccagccgccgtagacggcgccgactccgccgacgacggcaacgcctcgccgctcgcgcccccgcgcccgtcccgcgccgaggccgccgccgtcaagcccatcagctcgcgcccaatggatccgccgcgccgctccatggtgccctctttctcggagcagcgctcgaagcgcccccgcagcgtcgccgtcccgtcatccgtggagcacctcaagaggccgacgcggctctggagcctccacgacgagatcgtcatcctgcggggcttggccacgtaccgcgccaagcgtggcgtcctccccggctccacgtacgacatttctaagctacacggccgcatccggagcgagctcagcgttaaggtaaccaccacgcagctcggtgacaaggtacggcgtctcaagcagaagtacaacctgcttgcgtcacgtggcaagagcgggcgggatccagacttgcccagccagcacgaacagagcgtctatgagattggcaagaaggtttggggaggaagtgctaacggtggaggaagtaccggtggtgatgggtacgagattggtggtgacagcgaagaggagcatgagtttcgagagagtgacgaggatgtggagaatggccgagatgaacgtgcccgcaagaacaggagggttatgccaatcgccatggcaaacggcaacggggctgggttgggggctgtgaaagccaatagcagagggaagtttgatactgagaagggaaaggatgcttacccctacctttgggagactgtggaggatctgtcaaaggagcacccgaacggggtagcattcaagaaggccttcgagtcgatcgaaggccccaaagcgcgtgggatggaggaaaaactgcgaaagttcaggttgacagagatcagacaccagctgcgccgtatggaactgatgaaggagacggtgaagatggtgctcgatgcgctggagggttgaccgagactgaatggtcttctggtcttcttttgtttctagatagagtttttgtggctgagttacttaacttttatggacaaaggtgcacttgtctcagtaagaatataggtacagaaagaaagtgagactgatggtgtttcccttgttcctgtggatcatatgtgctgtttggtttaagaaatgtaacgcaaagggtaatggtaatggtttacattcgatcaaaaaaaaaaaaaaaa

SEQ ID NO: 4892 - DNA, 1682 bp, Sorghum bicolor
accaaacccacaagtcgctcgaccccagcacagatagagcatcgcaattcaccaccagcgcgacgagttcctcagccgcagccgcagccgcagccgccgatccacccggcgtcgagaccctaggcgcgcttgctcccctcgccgcccgcatggcaccgaagcgcccggcggcggtggcggcctcggggtcggcgtccgaggcatccgacgcggaggcggacgcggcccaccaccagccgtcctccccgtccccgtccaagacgccgccgcccaaccctaaccctaagtccgccgccgccggccccacctcggcggcggaggactccaccgcggccggatccgactccgaggccgcctacgactctgacgcggaccaccgccccgcgccccggaaggcggcggcggcggcagcgtcgtcgccctcgcgcaagcccaggagccccaggccgcgctcccgctcccgctccccggacgccgcctcgtactccgacgtcgcggcctcagacgccgaccccaccgccggagactccgccgacgacgacaacgcctccccgctcgccctccggcccccgcgcccgtcccgcgccgaggctgccgccatcaagcccctcagctcgcgccccatggatccgccgcgccgctccatggtaccctctttctccgagccgcgcccaaagcgcccccgcagcgccgccgtcccgtcatccgtggagcagctcaagaggccgtcgcggctctggagcctccgcgacgagatcgtcatcctgcggggcttggccacgtaccgcgccaagcgtggcgtcctccccggctccatgtatgacatttctaagctccatggacacatccagagcgagctcagtgttaaggtaactccaacgcagctcagtgacaaggtacgacgtctcaagcagaagtacaacctactttcgtcccgtggcaagaatgggcgggatccagacttgcccacccagcatgaacagagtgtttatgagattggcaagaaggtttggggaacgactgctaatggtggaggaagtacaggtggtgatgggtatgagattggtggtggtggtgatgacagcgaagaggaccacgagattgcagagagtgatgacgatgtggagagtgggcgggatgaacgcccccgcaagaacaggagggttatgccaatcgctatggcaaatggaaacggggctgggtttggggctatgaatgccaatagcagagggaagtttgatattgagaagggaaaggatgcttatccatacctttgggagactgtagaggatctgtcaaaggagcacccgaatggggtagcattcaagaaggcctttgagttgatcgaaggccccaaagcgcgtgggatggaggaaaagctgcgaaaatttaggctgacagagatcagacaccagctgcgccgtatggaactgatgaaggagacagtgaagatggtgcttgatgcgctggagggttgactgaataatgaatgatcttctggtgggtgagtagtgcaatgttcaaaggagcagtcagtgtcttcttttgtttctagatacagtttctgtggctgaattacttaacttttgtggacaaggcacacttgtctcagtaagaatttaggtacagaacagggagtgagagtgatggtgtttcccttgttcttggtggatcatagtata

SEQ ID NO: 4893 - DNA, 1583 bp, Zea mays
actgtattattgtgtggctcagctcaacaagctcgccgcaccgtcgccatggacgccgccaccggcaactgttcctcctctccgctgcgcatcgtgatctgcccgtggctcgcgttcggccacatgctcccgtgcctggagctcgcggagcgtctggcttcgcggggccaccgcgtgtccttcgtctccacgccgcgcaacctggcgcgcctcccgccgcggcgccacgacgtgcacctcgtgcccctgcccctcccacgcgtggagggcctccccgacggcgtcgagtccaccaacgacgtgccccccgacaagagagacctccactggaaggccttcgacggcctcgccgtccccttcgctgagttcctggccgccgcgtgcgccgacgaggctaccaggccggactgggtcctcgccgacacattctcccattgggcggccgccgtcgccctcgagcacaaggtgccaagcgcgatgcttctcccgagcgccgccatgatcgcctcgtgctggcaccggccgccgtcgcacgccgagcagccgagaagcgcagtgtttgaggagccggcggaacggccggcgggtgtgctcccttacgagtgggataaaagagcgcacttctttgggccccaaagagcgtcgggcatgtccaccgcgcagcgctgcttcctgacactgcagaggtgcaggctgctggccatgcggagctgccccgagtgggagccggagaatttcacggtggcggcggcactcctcggcaagccgctcgtgccgctcggcctcctaccgccgtcgcccaacggtggacgacgacgagaggaggacggcggcagtacggcgcgctgctggctggacgcgcagccgccgagctcggtcgtgtacgtggcgttgggcagcgaagtcccgctgacggtggcgctggtgcacgagctcgcccttgggctggagctcgccggcgcacgcttcctttgggctctccggaagcccagcggcgtcgcggacgacgccgacgtgctcccgccgggattccgggagcgcacctgcggccgcgggctcgtcgccatgggctgggtccctcagatgagcatactggcgcacggcgccgtgggcgggttcctgacgcactgcggccggaactcgctcgtcgaagggctcctgttcggccaccctctcgtcatgctgcccgtcgtcggggaccagggccccaacgcgcgcgccatggagcggaccaaggttgggctgcaggtggcgaggaacggcaaggacgggtcgttcgaccgccacrgcgtcgccgccgccgtccgggaagtcatgctggtggaagaagccaggaaggtcttcgtggcgaatgccctggaaatgcagcgtgttgtggccgacaaggaacgccatgagagatacatcgacgagttcatacgccagctgagatcttactccactccgccggcagcgagttaaaaaggcgtacttggtggcttggtgcctcgcactgtatgtctgtatggggtctaggatgtcaacggttacgtacccgtccagtaatattattccatacttacctatcaaaaaaaaaaaaaaaa

SEQ ID NO: 4894 - DNA, 1276 bp, Zea mays
gcgtcccccttttgccgatccagttgtgccgatcggtaatttcccgcgtccaccaaaaccagttgccgccgtttttttcgtcgccgccacggaccaggatcgaccggtgccgatgaagccagcggaggacgaggatgcgccggcgacggcggcagcgcagacggtctggtacgaccccatgacttcgccgcaggcgccggcgccgcagcagcagccggcgatagaggctgcgatgcggggggcctcgccgtcggtgagctccaacgcgcggcctctcagggtgtacgccgacggcatctatgatctcttccacttcggccatgcgcgcgcgctcgaacaggccaagaagtcatttcccaacacctacttgctggtaggttgctgcagcgacgagatcacccacatgtacaaaggaaagaccgtcatgaccgaggacgagcgctacgaatcgcttcggcattgcaagtgggtcgacgaggtcataccggacgctccatgggtgatcaaccaggagttcatcgacaagcacgacatcgactacgtcgctcacgacgcgctcccatacgctgacacgagtggagctgccaatgatgtctatgaatttgtgaaagccatcgggaagttcaaggagacgaagcgcaccgagggcatctcgacgtcggacatcatcatgaggatcttgaaggactacaaccagtacatcatgcggaacctcacccgcgggtacagccgcaaagatctcggcgtcagctacgtcaaggagaagcagctgagagtcaacatggggatcagcaagctacgggagaaggtgaaggagcaccaggagaagttccacagcgcggcgaagatcgctgggaccaaccctgtggagtggatggagaacgcggaccgctggatcgttggcttccttgagaagttcgaggaaggctgccacatgatggaaactgccattaaaggtcggattcaggaggggttgaagcggcaaggcaggtcggagtcaaacctttctggagaggagtccgactcgtagttctgtgatctcccccaaatgaagctagacaaaaggagaactggagatcatttcccacagtctgtgtaacagtatgagattggttaattagcatgttattgtaggacgccatggatcattgtttagttgtacctggagattatgtagttttgaagaacaatcgtgtttctgtatgcgatcagttgctccttcattgagcatatctgcatctggcacctgctaggaagtaggaactgctattgtttt

SEQ ID NO: 4895 - DNA, 1299 bp, Zea mays
ccttttgccgatccagttgtgccgatcggtattttcccgcgtccaccaaaacccgttgccgccgtttttttcgtcgccgccacggaccaggatcgaccggtgccgatgaagccagcggaggacgcggatgcgccggcgccggagacggcggcagcgcagacggtctggtacgaccccatgacttcgccgcaggcgccggcgccgcagcagcaaccggcgatagaggctgcgatgcggggggcctcgccgtcggtgagctccaacgcgcggcctctcagggtgtacgccgacggcatctatgatctcttccacttcggccatgcgcgcgcgctcgaacaggccaagaagtcatttcccaacacctacttgctggtaggttgctgcagcgacgagatcacccacatgtacaaaggaaagaccgtcatgaccgaggacgagcgctacgaatcgcttcggcattgcaagtgggtcgacgaggtcataccggacgctccatgggtgatcaaccaggagttcatcgacaagcacgacatcgactacgtcgctcacgacgcgctcccatacgctgacacgagtggagctgccaatgatgtctatgaatttgtgaaagccatcgggaagttcaaggagacgaagcgcaccgagggcatctcgacgtcggacatcatcatgaggatcttgaaggactacaaccagtacatcatgcggaacctcacccgcgggtacagccgcaaagatctcggcgtcagctatgtcaaggagaagcagctgagagtcaacatggggatcagcaagctacgggagaaggtgaaggagcaccaggagaagttccacagcgcggcgaagatcgctgggaccaaccctgtggagtggatggagaacgcggaccgctggatcgttggcttccttgagaagttcgaggaaggctgccacatgatggaaactgccattaaaggtcggattcaggaggggttgaagcggcaaggcaggtcggagtcaaacctttctggagaggagtycgamtcgtagttctgtgatctcctccaaatgaaactagacaaaaggagaactggagatcatttcccagtctgtgtaacagtatgagattggttaattagcatgttattgtaggatgccatggatcattgtttagttgtacctggagatcatgtagttttgaagaacaatcgtgtttctgtatgcgatcagttgctccttcattgagcatatctgcatatggcacctgctaggaagtaggaactgctgttcatttgaaaaaaaagaaaaaaaaaaaaaaaa

SEQ ID NO: 4896 - DNA, 939 bp, Sorghum bicolor
atgaagccagcggaggacgcggacgtccaggaggcgatggtgacggcgacggcggcggcggcggcggcgcagacagtttggtacgatcccatgtcttcgccacaggcgccggcgccgcaccagcagccggcgatagagactgcggaggcggcctcgccgtcgatgagctccgacgcgcggcctctcagggtgtatgccgacggcatctacgatctcttccacttcggccatgcgcgcgcgctcgaacaggctaagaaatcatttcccaacacctacttgctggtaggttgctgcagtgatgagatcacccacatgtacaaaggaaagaccgtcatgaccgaggacgagcgctatgaatcacttcggcattgcaagtgggttgacgaggttataccagatgctccatgggtgatcaaccaggagttcatcgacaaacacaacatcgactatgtcgctcatgatgcgctcccatatgctgacacgagtggagctgccaatgatgtctatgaatttgtgaaagctattgggaagttcaaggagacgaagcgcaccgagggcatctctacatcggacatcatcatgaggatcttgaaggactacaaccagtacattatgcggaatctcacccgtgggtacagccgtaaagacctcggcgtcagctatgttaaggagaagcaactgagagtcaacatggggattagcaagctaagggagaaggtgaaggagcatcaagagaagtttcacagtgcggcaaagatcgctggaaccaaccctgtggagtggatggagaatgcagaccgttggattgttgggttccttgagaagtttgaggaaggttgccacatgatggaaactgccattaaagatcgaattcaggagggattgaagaggcaaggcaggtcagagtcaaacctttctggagaggactccgactcgtaa

SEQ ID NO: 4897 - DNA, 1073 bp, Oryza sativa Japonica Group
aaaaaaaaaaaagtaggctttgggatcgccgccggtgacgatgaagccactgaaggacgcggacgcgcaggagaaggcggcgccgccgccgacggagtggtacgacccgctgtcgtcgccggggcggccggtcagggtgtacgccgatggcatctacgacctcttccacttcggccatgcccgcgccctcgagcaggccaagaaatcattccccaacacatatttgctcgtgggctgctgcagcgacgagatcaccaacctttacaaaggcaagaccgtcatgactgaagacgagcgctacgaatcgcttcgccattgcaagtgggtggatgaggtgataccagatgctccatgggttatcaatcaggagttcctagacaagcaccgcatcgactacgtcgctcatgatgctcttccgtatgcggacaccagtggagctgccaatgatgtctatgaatttgtgaaggccgttgggaagttcaaggagacgaagcgcaccgagggcgtctcgacgtctgacatcatcatgaggatcttgaaggactacaaccagtacatcatgcgaaatctgacccggggatactcccgcaaagacctcggtgtgagctatgtcaaggagaagcaacttagagtaaacatggggatcagcaagctaagggagaaggtgaaggagcatcaagagaagtttcacagcgcggcaaagatagctggaagcaatcctgtggagtggatggagaatgccgaccgttggatcgttgggtttcttgaaaagtttgaggaaggttgccacatgatggaaaccgcgattaaagatcggattcaggaggggctgaagaggcaaagcaggtcggaccccaacctttctggggaggattccgactcataatggatcctgtaatatccagatcaaactgggaagagaaaaaattgtggagatcatttctagccttgtgtgagattagcctcatgttgtaggacaattaaagtgaccgtgcatggtttgtttgtaccaaaaggttttgtacttctgagaacaataataatagttcgtgcaattactgctcaaggttatc

SEQ ID NO: 4898 - DNA, 1450 bp, Zea mays
gtctgttcttgtctgcggttctctgttcgagtccaaggctccaagcaagcaaagaaccgaaccaccgggagcaagaaattttcccagagtaagcaagtcccaggactcaaccaagaagagccctttgcatgcagatggagggaagggagggtattgcagttggccgcgaatccggccacggcagcatgttcagagcagcagacatcgccatggcggaggcgcaagaagcagcagcgaaaggctaccagtcctctccatcctcgccgtcgacgtcccccacgccgtcgccgccagcggctgcggctggccacgccggggacgccgccgcgactccgcttgcctggagcttgggcggcgagacgccgagtggggccgtggtggtggacaacggcacgcaaacggccgggcagagcgagcacgccagcctgagctccgggcgccgccggggccggccgcgcggttccgggaggcgccagatcctagccactctaggggaatggtacgcgctgtcagccggcgggagcttcacgcctcatgtcatcatcgtgggtactggggaggatgtggcggcgcgcatcatgtcgttttctcagaagggtccacgctcggtctgcatcctctctgccaacgggtcaatctctaatgtaacactgaggcagccggatgcatctgggagcaccttcacctacgagggccgtttcgagatcctgcagctgatgggctccttcacaatggccgaggaaggccggaggagaaccggcgggctgagcgtctctcttgctggccctgacggccgcgtagtcggcggcgtagtggctgggatgctgcgtgctgcaagtcctatacaggtgatcgtcggaagcttcctgcccaacagcctgaagcagcaccagaggaggaggatgagcatgcagcagccttcccccgttccggcgttaccagcacccgtggcacccccgccgccggtgcttaccgcggccaccccgatctcgcaggcaggtcccgggaacgggttccacgcaccgccgccgccgcactccgcagcacctccccagccccacgccaacgccatgaacctgaacgcgacgacgacgggcttcaccatggtcggctggcctgcaagctcgccgcagcccatggcgtacagggcttcacctgacatcaacgtcagcttgactccccaggagtaggatcgctgggctcgtcttcttcctttttctttcttttttttttctttccctgggctgacacgttttgggtgggagagaggaaacagagcgtggctgatgctctgaatgagattatggactaatctggtgttaattttagggtagggcgtgccaacttgtttgggttgctgctttcggccgtcatggctgtggatgttgatttagttctagttctagtcagtcagtcctattcagtttctgtcaaaaaaaaaaaaaaaaaa

SEQ ID NO: 4899 - DNA, 1490 bp, Zea mays
gtcatgtggagccgacagatgatggcctcggcaccggcggcgccggcgacatcgaccgatctcctcgtcgtcggccagtaacacgcattctctctccctgcccagatggagggaagggagggtattgcagttggccgcgaatccggccacggcagcatgttcagagcagcagacatcgccatggcggaggcgcaagaagcagcagcgaaaggctaccagtcctctccatcctcgccgtcgacgtcccccacgccgtcgccgccagcggctgcggctggccacgccggggacgccgccgcgactccgcttgcctggagcttgggcggcgagacgccgagtggggccgtggtggtggacaacggcacgcaaacggccgggcagagcgagcacgccagcctgagctccgggcgccgccggggccggccgcgcggttccgggaggcgccagatcctagccactctaggggaatggtacgcgctgtcagccggcgggagcttcacgcctcatgtcatcatcgtgggtactggggaggatgtggcggcgcgcatcatgtcgttttctcagaagggtccacgctcggtctgcatcctctctgccaacgggtcaatctctaatgtaacactgaggcagccggatgcatctgggagcaccttcacctacgagggccgtttcgagatcctgcagctgatgggctccttcacaatggccgaggaaggccggaggagaaccggcgggctgagcgtctctcttgctggccctgacggccgcgtagtcggcggcgtagtggctgggatgctgcgtgctgcaagtcctatacaggtgatcgtcggaagcttcctgcccaacagcctgaagcagcaccagaggaggaggatgagcatgcagcagccttcccccgttccggcgttaccagcacccgtggcacccccgccgccggtgcttaccgcggccaccccgatctcgcaggcaggtcccgggaacgggttccacgcaccgccgccgccgcactccgcagcacctccccagccccacgccaacgccatgaacctgaacgcgacgacgacgggcttcaccatggtcggctggcctgcaagctcgccgcagcccatggcgtacagggcttcacctgacatcaacgtcagcttgactccccaggagtaggatcgctgggctcgtcttcttcctttttctttcttttttttttctttccctgggctgacacgttttgggtgggagagaggaaacagagcgtggctgatgctctgaatgagattatggactaatctggtgttaattttagggtagggcgtgccaacttgtttgggttgctgctttcggccgtcatggctgtggatgttgatttagttctagttctagtcagtcagtcctattcagtttctgtctttctgcgctgcagctatttagcatgtcctgttattggtgaatcttttctgatgatagagggaggaatcatcttctgatgacagagg

SEQ ID NO: 4900 - DNA, 1089 bp, Sorghum bicolor
atgcagatggagggaggaagggagggtattgcagtggcgcccggaggtggtggccatgaatccggcggccatggcatgttcagagcagcagcagcagcagcagacatcgccatggcggaggcgcaagaagaagcagcagtgaaggggtaccagtcctctccgtcgacgtcccccacgccgtcgccgccaccaccggctgcggctgcggctggccacgccggggacgccgccgcgactccgcttgcctggagcttgggcggcgaggagaagccgagtggcgccgcgggggacaacaacggcatgcagacggccgggcagagcggcgagcacgccagcctcagctccgggcgccgccgcggccgcccgcgcggctccgggaggcgccagatcctcgccactctaggggaatggtacgcgatgtcagccggagggagcttcacgcctcatgtcatcatcgtgggtactggggaagatgtggcggcgcgcatcatgtcgttttctcagaaaggtccacgctcggtctgcatcctctctgccaacgggacaatctctaatgtaacactgaggcagccggatgcatctggtagcaccttcacctatgagggccgtttcgagattctgcagctgatgggctccttcacaatggctgaggaaggtcggaggagaaccggcgggctcagtgtttcccttgctggccctgatggccgtgtagttggtggcgtagtggctgggatgctgcgtgctgcaagtcctatacaggtgatcgttggaagcttcctgcccaacagcctgaagcagcatcagaggaggatgagcatgcagcagcaaccctcccccgtttcaccagcgttaccagcacttgtggcgcccccaccggtgctcaccacagccacaccaatctctcaggcaggtccggggaacgggttccacgcaccgccaccctcggccacacctccccagccccacgccagcgccatgaacctgaactcgacgggcttcaccatggttggttggcctgcaagctcgccgcagcccttggcatacagggcttcacctgacatcaacgtcagcttgactccccaggagtag

SEQ ID NO: 4901 - DNA, 1579 bp, Oryza sativa Japonica Group
acagctactactggtgcctggtagtaaccagacacagagggaaagcaaaacaagagtgggtgtctcctgttgtctgtcttcctcctcgtttgagctccaagcaagcttagccaagaaacaccataaagaagagagtgagagagagtgtgtgtgtgagaggaggtgagcttctctcacatgcacatggagggaggggagggcattgctgtagcaggtgcaggtggtggccatgaagccggcttcggtttgttcagagcggccgatgtgaccatgacagaggcgcaagaagcagccaaggagtaccagtcttctccctcctcgccgtcgacgtctcctactccttccccgccgccggttgctgcctccggccatggaggggaggccgctgcaacgccgaccatgtggagtttgggcggcgagaagatgccgagtgaggctgcaggggacaacggcatgcagatgtcaggccacagtgagcatgctagcttgagctccggacggcgtaggggccggccaaaagggtccgggagacgccagatcctagccactctaggggaatggtatgcgctatcagctggagggagcttcacccctcatgtcatcatcgtaggcacaggggaggatgtggcggggcgcataatgtccttctctcagaagggtccacgctcgatttgcatcctctctgccaatgggaccatctccaatgtggcattgagccagcctggctcgtccggtagcaccttcacctacgagggtcggtttgagattctgcaactgactggctcctttacaatggcggaagaaggtggtcggaggagaactggtgggctcagtgtatcgcttgccggtcctgatggccgtgtcgttggtggtgtagtagctgggatgctgcgtgccgcaagccctattcaggtgattgtggggagcttcctgcccaacagcctaaagcagcatcagaggaggatgggcctacaacagcaaccatctgctgccccggcactaccaccgcctatggctccacctcctgtgctcacagctgcaatgcctatctctcaggcagctcctggaactaatggttgccatgcgccgcaggtctcatctatgcatccgcaagcccacaccggtgtaatggagcacagtgcaacagccagtggcgccatgaaccttaacagctcaagctccacaggtttcaccatggttgggtggccagtcagctcacagtccatggggcacaggccttcacctgacatcaatgtctgcttaactcctcaggagtagcatcagctattgagctatcatcttttgtcacccccatccctgacacattttgtagggcatggctgttaatctttgccatgtgcgatgacaaattatgggctctattctaatccattaggtctgcggtttaattttggggggagaaactaggcaagactaaggacaatttagccagaatctgacagaatgtgatagtctattagttgcagttgccctcatctaattgttaggatatgtcattgtgttgggacatctggtttgtgattcagatttcattctcgctgttgctggctcttgtact

SEQ ID NO: 4902 - DNA, 1071 bp, Sorghum bicolor
atgggcggaagggagggcattgcagtggcaggtggccatgaatccggccacggtctgttcagagcagacatctccatgacagaggcgcaagaagcagcagcgaaggggtaccagttctctctctcctcgccgtcgacgtcccccactccgtccccgccgccaccagctgcggctggcgatggtggggacgccactccagttccgctagcctggagtctgggtggggacaagccgagcgaggcctccgggaacaacggcgtgcagacggccgcgcagactgagcacgccaacctgagctccggacgccgccgcggccggccgcgcggttccgggaggcgccagatcctagccaccctaggggaatggtacgccctgacagccggagggagcttcacacctcatgtgatcatcgtgggtactggggaggatgtggcggcgcgcataatgtcgttttctaagaagggtccacgctcggtctgcatcctctctgcaaatgggacaatctctaatgtaacactgaggcagccggatccatctggtagcaccttcacctatgagggtcttttcgagattctgcaattgacgggctccttcacaatggctgaggaaggtcggaagagaaccggtgggctcagtgtctctcttgctggcccagatggccgtgtagttggcggcgtggtggctgggatgctgcgtgctgcaagtcctatacaggtgatcgtggggagcttcctgcccaacagtctgaagcagcaccagaggaggatgaccttgcagcagcagcagcagcagccacctgccttcccggcaccaccagcaccaccagcacctgtggctccccctcctgtgctcactgccgccatgccaatctcccaggcaggtttcggcaacggcttccacgcaccgccaccatctgtcgtgcctccacaaccccatgccagcacggagcacggcgccatgaacctgaactcaacgacgggcttcaccatggttggctggcctgcgagctccccgcccatgccgcacagggcctctcctgacatcaacgtcagcttgactccccaggagtag

SEQ ID NO: 4903 - DNA, 1546 bp, Zea mays
accaccgcagccgcagcacaatcgcctcgccttcccttccccaccagcccccgtctctctctctctctttctctctctcgtagccgcgtccacctcgcagcagcaagcaagcgcgaccaaatggcgcctctaggagacggcggagctgctgccgcggcggcgtccaacaacctggtggtgtcgttcggcgagatgctgatcgacttcgtccccgacgtggccgggctgtcgctggccgagtcgggcggcttcgtcaaggcccccggcggcgcgcccgccaacgtcgcctgcgccatcgccaagctcggcggctcctccgccttcgtcggcaagttcggcgacgacgagttcgggcacatgctggtgaacatcctgaagcagaacaacgtgaactcggaggggtgcctgttcgacaagcacgcgcggacggcgctggccttcgtgacgctcaagcacgacggggagcgcgagttcatgttctacaggaacccgagcgcggacatgctgctgacggaggcggagctggacctgggcctggtgcggcgcgccagggtgttccactacggctccatctcgctcatctccgagccgtgccgctcggcgcacatggccgccatgcgcgcagccaaggccgcgggcgtgctctgctcctacgaccccaacgtgcgcctcccgctctggccgtcgcccgacgccgcacgcgagggcatcctcagcatctggaaggaggccgacttcatcaaggtcagcgacgacgaggtggccttcctcacgcgcggggacgccaacgacgagaagaacgtgctgtccctgtggtttgacgggctcaagctgctcgtcgtcaccgacggggacaagggatgcaggtacttcaccaaggacttcaagggcagcgtgtccggcttcaaggtcgacaccgtcgacaccaccggcgccggcgacgccttcgtcggctccctcctcgtcaacgtcgccaaggacgactccatcttccacaacgaggagaagctccgcgaggctctcaagttctccaacgcctgcggcgccatctgcaccaccaagaagggcgccatcccggcgctgcccacggtcgccaccgcccaggacctcatcgccaaggccaactagatcatggccgcacgcccgccgttccaccacgtcactgtcccccgccgccccgcccctcgtcgtcgacgtcctcggtttcggttcattaggtagatcgagtcttagcgtccgtctctgcgcctctacgctgagacggtttgtttgggttaattaagttagctttcgtggagatttcgccccggggcatcaataaaatgttggcatgcgtggtgggatgctatcctttatttttattttatttttagcttggatcagttggggttttgaacattgctagtgtcgtgtgrttgggaaggctaatgtgatgccttccatgcagagttttcaatgraaaaaaaaaaaaaaaaaaaaaaaccaaaaaaaaaaaaaaaaaaaaaaaaaaaaaaaaaaaaaaaaaaaamcaaaaaaaaaaaaaaaa

SEQ ID NO: 4904 - DNA, 1503 bp, Zea mays
accaccgcagccgcagcacaatcgcctcgccttcccttccccaccagcccccgtctctctctctctctttctctctctcgtagccgcgtccacctcgcagcagcaagcaagcgcgaccaaatggcgcctctaggagacggcggagctgctgccgcggcggcgtccaacaacctggtggtgtcgttcggcgagatgctgatcgacttcgtccccgacgtggccgggctgtcgctggccgagtcgggcggcttcgtcaaggcccccggcggcgcgcccgccaacgtcgcctgcgccatcgccaagctcggcggctcctccgccttcgtcggcaagttcggcgacgacgagttcgggcacatgctggtgaacatcctgaagcagaacaacgtgaactcggaggggtgcctgttcgacaagcacgcgcggacggcgctggccttcgtgacgctcaagcacgacggggagcgcgagttcatgttctacaggaacccgagcgcggacatgctgctgacggaggcggagctggacctgggcctggtgcggcgcgccagggtgttccactacggctccatctcgctcatctccgagccgtgccgctcggcgcacatggccgccatgcgcgcagccaaggccgcgggcgtgctctgctcctacgaccccaacgtgcgcctcccgctctggccgtcgcccgacgccgcacgcgagggcatcctcagcatctggaaggaggccgacttcatcaaggtcagcgacgacgaggtggccttcctcacgcgcggggacgccaacgacgagaagaacgtgctgtccctgtggtttgacgggctcaagctgctcgtcgtcaccgacggggacaagggatgcaggtacttcaccaaggacttcaagggcagcgtgtccggcttcaaggtcgacaccgtcgacaccaccggcgccggcgacgccttcgtcggctccctcctcgtcaacgtcgccaaggacgactccatcttccacaacgaggagaagctccgcgaggctctcaagttctccaacgsctgcggcgccatctgcaccaccaagaagggcgccatcccggcgctgcccacggtcgccaccgcccaggacctcatcgccaaggccaactagatcatggccgcacgcccgccgttccaccacgtcactgtcccccgccgccccgcccctcgtcgtcgacgtcctcggtttcggttcattaggtagatcgagtcttagcgtccgtctctgcgcctctacgctgagacggtttgtttgggttaattaagttagctttcgtggagatttcgccccggggcatcaataaaatgttggcatgcgtggtgggatgctatcctttatttttattttatttttagcttggatcagttggggttttgaacattgctagtgtcgtgtgattgggaaggctaatgtgatgccttccatgcagagttttcaatgaatgccttggtgcaaaaaaaaaaaaaataaaaaaaaaaaaaaaaa

SEQ ID NO: 4905 - DNA, 1376 bp, Zea mays
accaccgcagccgcagcacaatcgcctcgccttcccttccccaccagcccccgtctctctctctctctttctctctctcgtagccgcgtccacctcgcagcagcaagcaagcgcgaccaaatggcgcctctaggagacggcggagctgctgccgcggcggcgtccaacaacctggtggtgtcgttcggcgagatgctgatcgacttcgtccccgacgtggccgggctgtcgctggccgagtcgggcggcttcgtcaaggcccccggcggcgcgcccgccaacgtcgcctgcgccatcgccaagctcggcggctcctccgccttcgtcggcaagttcggcgacgacgagttcgggcacatgctggtgaacatcctgaagcagaacaacgtgaactcggaggggtgcctgttcgacaagcacgcgcggacggcgctggccttcgtgacgctcaagcacgacggggagcgcgagttcatgttctacaggaacccgagcgcggacatgctgctgacggaggcggagctggacctgggcctggtgcggcgcgccagggtgttccactacggctccatctcgctcatctccgagccgtgccgctcggcgcacatggccgccatgcgcgcagccaagtccgcgggcgtgctctgctcctacgaccccaacgtgcgcctcccgctctggccgtcgcccgacgccgcacgcgagggcatcctcagcatctggaaggaggccgacttcatcaaggtcagcgacgacgaggtggccttcctcacgcgcggggacgccaacgacgagaagaacgtgctgtccctgtggtttgacgggctcaagctgctcgtcgtcaccgacggggacaagggatgcaggtacttcaccaaggacttcaagggcagcgtgtccggcttcaaggtcgacaccgtcgacaccaccggcgccggcgacgccttcgtcggctccctcctcgtcaacgtcgccaaggacgactccatcttccacaacgaggagaagytccgcgaggctctcaagttctccaamgcctgcggcgccatctgcaccaccaagaagggcgccatcccggcgctgcccacggtcgccaccgcccaggacctcatcgccaaggccaactagatcatggccgcacgcccgccgttccaccacgtcactgtcccccgccgccccgcccctcgtcgtcgacgtcctcggtttcggttcattaggtagatcgagtcttagcgtccgtctctgcgcctctacgctgagacggtttgtttgggttaattaagttagctttcgtggagatttcgccccggggcatcaataaaatgttggcatgcgtggtgggatgctatcctttatttttaaaaaaaaaaaaaaaa

SEQ ID NO: 4906 - DNA, 1561 bp, Zea mays
accaccgcagccgcagcacaatcgcctcgccttcccttccccaccagcccccgtctctctctctctctttctctctctcgtagccgcgtccacctcgcagcagcaagcaagcgcgaccaaatggcgcctctaggagacggcggagctgctgccgcggcggcgtccaacaacctggtggtgtcgttcggcgagatgctgatcgacttcgtccccgacgtggccgggctgtcgctggccgagtcgggcggcttcgtcaaggcccccggcggcgcgcccgccaacgtcgcctacgccatcgccaagctcggcggctcctccgccttcgtcggcaagttcggcgacgacgagttcgggcacatgctggtgtgcgtcctgaagcagaacaacgtgaactcggaggggtgcctgttcgacaagcacgcgcggacggcgctggccttcgtgacgctcaagcacgacggggagcgcgagttcatgttctacaggaacccgagcgcggacatgctgctgacggaggcggagctggacctgggcctggtgcggcgcgccagggtgttccactacggctccatctcgctcatctccgagccgtgccgctcggcgcacatggccgccatgcgcgcagccaaggccgcgggcgtgctctgctcctacgaccccaacgtgcgcctcccgctctggccgtcgcccgacgccgcacgcgagggcatcctcagcatctggaaggaggccgacttcatcaaggtcagcgacgacgaggtggccttcctcacgcgcggggacgccaacgacgagaagaacgtgctgtccctgtggtttgacgggctcaagctgctcgtcgtcaccgacggggacaagggatgcaggtacttcaccaaggacttcaagggcagcgtgtccggcttcaaggtcgacaccgtcgacaccaccggcgccggcgacgccttcgtcggctccctcctcgtcaacgtcgccaaggacgactccatcttccacaacgaggagaagctccgcgaggctctcaagttctccaacgcctgcggcgccatctgcaccaccaagaagggcgccatcccggcgctgcccacggtcgccaccgcccaggacctcatcgccaaggccaactagatcatggccgcacgcccgccgttccaccacgtcactgtcccccgccgccccgcccctcgtcgtcgacgtcctcggtttcggttcattaggtagatcgagtcttagcgtccgtctctgcgcctctacgctgagacggtttgtttgggttaattaagttagctttcgtggagatttcgccccggggcatcaataaaatgttggcatgcgtggtgggatgctatcctttatttttattttatttttagcttggatcagttggggttttgaacattgctagtgtcgtgtgattgggaaggctaatgtgatgccttccatgcagagttttcaatgaatgccttggtgcaaacgtacgattgtgtaataatgccttctattgatcagcgactccaataaaaaaaaaaaaaaaaaaaaaaaaagaaaaaaaaaaaaaaaa

SEQ ID NO: 4907 - DNA, 1511 bp, Zea mays
accaccgcagccgcagcacaatcgcctcgccttcccttccccaccagcccccgtctctctctctctctttctctctctcgtagccgcgtccacctcgcagcagcaagcaagcgcgaccaaatggcgcctctaggagacggcggagctgttgccgcggcggcgtccaacaacctggtggtgtcgttcggcgagatgctgatcgacttcgtccccgacgtggccggcctgtcgctggccgagtcgggcggcttcgtcaaggcccccggcggcgcgcccgccaacgtcgcctgcgccatcgccaagctcggcggctcctccgccttcgtcggcaagttcggcgacgacgagttcgggcacatgttggtgaacatcctgaagcagaacaacgtgaactcggaggggtgcctgttcgacaagcacgcgcggacggcgctggccttcgtgaccctcaagcacgacggggagcgcgagttcatgttctacaggaacccgagcgcggacatgctgctgacggaggcggagctggacctgggcctggtgcggcgcgmcagggtgttccactacggctccatctcgctcatctccgagccgtgccgctcggcgcacatggccgccatgcgcgcagccaaggcggcgggcgtgctctgctcctacgaccccaacgtgcgcctcccgctctggccgtcgcccgacgccgcacgcgagggcatcctcagcatctggaaggaggccgacttcatcaaggtcagcgacgacgaggtggccttcctcacgcgcggggacgccaacgacgagaagaacgtgctgtccctgtggtttgacgggctcaagctgctcgtcgtcaccgacggggacaagggatgcaggtacttcaccaaggacttcaagggcagcgtgcccggcttcaaggtcgacaccgtcgacaccaccggcgccggcgacgccttcgtcggctccctcctcgtcaacgtcgccaaggacgactccatcttccacaacgaggagaagctccgcgaggccctcaagttctccaacgcctgcggcgccatctgcaccaccaagaagggcgccatcccggcgctgcccacggwcgccaccgcccaggacctcatcgccaaggccaactagatggccgcacgccccgccgttccaccacgtcactgtcccccgccgccccgcccctcgtcgtcgacgtcctcggtttcggttcattaggtagatcgagtcttagcgtccgtctctgcgcctctacgctgagacggtttgtttgggttaattaagttagctttcgtggagatttcgccccggggcatcaataaaatgttggcatgcgtggtgggatgctatccttttttttattttattttattttatttttagcttggatcagttggggttttgaacattgctagtgtcgtgtgattgggaaggctaatgtgatgccttcgatgcagagttttcaatgaatgccttggtgcaaacgtacgattgtgtgaaaaaaaaaaaaaaaa

SEQ ID NO: 4908 - DNA, 1421 bp, Oryza sativa Japonica Group
atcgcttctcatcgcaaatcgcatcgacttcgattcgcttcgtttcgttctcgctgttgatttgttcgtgagatttgaattctagcaatggctcctctcggtgacggagcggcggcggcggcggcggcggagcccaacctggtggtgtcgttcggggagatgctgatcgacttcgtccccgacgtcgccggcgtctcgctggccgagtccggcggcttcgtcaaggctcccggcggcgcccccgccaacgtcgcctgcgccatctccaagctcggtggctcctccgccttcgtcggcaagtttggtgatgatgagttcgggcacatgctggtggacatcctgaagaagaacggggtgaacgcggaggggtgcctgttcgacgagcacgcgcgcacggcgctggcgttcgtgaccttgaaaagcaacggcgagcgcgagttcatgttctaccggaacccgagcgccgacatgctcctgacggaggcggagctcaacctggacctgatccggcgcgccaagatcttccactacggctccatctccctcatcaccgagccgtgccgctccgcccacgtcgccgccatgcgcgccgccaagtcggccggcatcctctgctcctacgaccccaacgtccgcctcccgctctggccgtccgaggacgccgcccgcgccggcatcctctccatctggaaggaggccgacttcatcaaggtgagcgacgacgaggtcgccttcctcacccagggcgacgccaacgacgagaagaacgtgctctcgctctggttcgacggcctcaagctcctcatcgtcaccgacggcgagaagggatgcaggtacttcaccaaggacttcaagggctccgtccccggcttctccgtcaacaccgtcgacaccaccggcgccggcgacgccttcgtcggctccctcctcgtcaacgtcgccaaggacgactccatcttccacaacgaggagaagctgagggaggcgctcaagttctcgaacgcgtgcggagccatctgcaccaccaagaagggtgccatcccggcgctgcccaccgtcgccgtcgcgcaggagctcatcagcaaggcagccaactagagctcctcggtttcgtcgtcgatcgccgccattgggggcctcggaattttaggtcgatttaatttagttgctgcttcgttttagacaaggaagaggaggggcttgggtgtgttcatgtctgtcttttgtgtgctaagttagttgcttccgtgtgagaacttttggcgtttatttttactattattattaataagaagctcttggatttgcggtggatattttggtctgaatttgtgtaatgaggcagctacttggcgaaatttattgtgtcatgtctttgttcagaggaaaagaaaatcttttcgtgtgctctgtttcaaatc

SEQ ID NO: 4909 - DNA, 1355 bp, Hordeum vulgare subsp. vulgare
ggcccaccaccaccagctttcctctggagctcgagcgatcgaatccaagcttccgtcgcgttcggcgtcctcgtttcgtctcgttcgtttagccaagagcccccaatggcgcctctcggtgacgctgttgcccccgcagccgccgcagcccccggcctcgttgtctccttcggcgagatgctgatcgacttcgtccccgacgtggccggcgtctcgctcgccgagtccggcggcttcgtcaaggcgcccggaggcgcgcccgccaacgtcgcctgcgccgtctccaagctcggcggctcctccgccttcgtcggcaagtttggcgacgacgagttcggccacatgctggtggagatcctgaagcagaacggcgtcaacgccgagggctgcctgttcgaccagcacgcgcgcacggccctggccttcgtcacgctcaaggccaacggcgagcgcgagttcatgttctaccgcaacccgtcggccgacatgctgctcacggaggccgagctcaacctggacctcatccgccgcgcccgcatcttccactacggctccatctcgctcatcaccgagccctgccgctcggcgcacgtcgccgccatgcgcgctgccaagtcggccggcatcctctgctcgtacgaccccaacgtgcgcctcccgctctggccctcggcccaggccgcccgcgacggcatcatgagcatctggaaggaggccgacttcatcaaggtgagcgacgatgaggtggccttcctcacccagggcgacgccaacgacgagaagaacgtgctctccctctggttcgagggcctcaagctgctcatcgtcaccgacggcgagaagggatgcaggtacttcaccaaggacttcaagggctccgtgcccggctactctgtcaacaccgtcgacaccaccggcgccggcgacgccttcgtcggctccctcctcgtcaatgtctccaaggacgactccatcttctacaatgaggccaagctgagggaggtgctgcagttctcgaacgcttgcggtgccatctgcaccaccaagaagggagccatcccggcgctgcccaccaccgccaccgccctggagctcatcagcaagggcagcaactagagacgccttgtgtcgcgccgtcggggttgaatcttaggggagtttagctgcacttttattattaggtatgagttgagttttagttcttgtgtcagtgtgtgacctcgtgggcgcttaataaaaagcaagcatgtgtggtgattttggttactgtctttgtgtaaggaggctaatggttgttgtagccttcacccagaatttatcagtcttatgaatggacaagtttatcaaaatttatc

SEQ ID NO: 4910 - DNA, 1792 bp, Sorghum bicolor
agaccctgcgcgagaggactggagcacctgctgcagcaagtagtgacgaggagcgtgcgtgcagccaaggaaaggagttgagcaatggagaaggccatcgacaggcagcgggtcctgctgcggcacctcagccccgcggcggcggcggagagccccgccccgcccgccatctccgcgagcgcgtgcgcggcgggcgacagcgcggcgtaccaccggacgcctgccttcgccgacgacgtcgtcatcgtcgctgcttacaggacggccatttgcaaggccaagagaggtggtttcaaggataccttcgctgaggacctcttggttcctgtcttcaaggctttggtagacaagacgaagctggacccaagtgaagttggcgacattgttgtcggtactgtcttagctcctggttcccagagggcaatcgaatgcagaatggctgcactctatgctggtttccctgacactgttcctcttaagactgtaaacaggcaatgctcgtctggccttcaggcagttgcagatgttgctactgctattaaagcagggctctatgacattggtattgctgctggtttggagtccatgacagtgaataaagttagtcttgatgggcaagtgaaccccaaagttgagctattttctcaagcacgcgattgccttctcccaatgggcctcacatccgagaatgttgcacaccgttttggcataacacgactggagcaagatcaagctgctgttgagtcacacagaaaggctgctgctgcagcagctgctggtaaattcaaagaggaaattgtgccagtgcatacaaagattgttgatccaaaaactggtgaggagaagaagattgtagtctcagcagatgatggaatccgaccggatacttcgcttgcagtcctgtcaaaactcaaaccagcattttcaaaggatggcaccaccactgctgggaatgcaagccaagtgagcgatggcgctggggctgtcttgctaatgagacgggatgttgctatgaaaaagggtcttccaattcttggtgtctttaggacctttgccgctgttggagttgatccagctgtaatgggtattggtcctgctgttgcaatccctgcagcagtgaaagctgctggcctccagatggatgacattgatcttttcgaaatcaatgaggcttttgcatctcagtatgtctactgctgcaagaagttggaacttgatcctgctaaagtcaatgttaacggtggtgcaatggctcttggacatccattgggttgtacaggcgcacggtgtgtcagtactcttctcaatgagatgaagcgccgtggcaaggattgccggttcggagtgatttctatgtgcataggttctgggatgggtgctgctgccgtattcgagcgtggagactgcgtcgatgagctcaccaattctcggggaatcccgacccataactggctttccaaggacgcgatgtaactacacccaccaaaattgccggaactggtagtattgtttccagatcgctatagaaggcgaattggcgaataaaatgattttgtatttgtcgcccctgctggggatttacaaaggttttgactccatcgatatctgaacttgcttatagctggaaaggtgcttgaataaggccttgtttaggtgcggagctgaaaagtttgtgggtactgtagcattttttgtttttatttgacaattattgttcaacatgaactaactaggcttaaaagatttgtctcacaaattaaagacaaactatgcaattagttattttttatct

SEQ ID NO: 4911 - DNA, 1578 bp, Zea mays
gcaagtagtgaccaggagcgagcagccaaggaaaggagccaagcaatggagaaggccgtcgacaggcagcgggtcctgctgcggcacctcaaccccgccgcggcggggagccccgccccgcccgccatctccgcaagcgcgtgcgcggcgggggacagcgcggcgtaccaccggaggccggccttcgccgacgacgtcgtcatcgtcgctgcttacaggacggcaatttgcaaggccaagagagggggtttcaaggatacctttgctgaggacctcttggttcctgtcttcaaggctttggtagacaagacgaagctggacccaagtgaagttggcgacattgttgttggtactgtcttagctcctggttcccagagggcaatcgaatgcagaatggctgcactgtatgctggtttccctgacaccgttcctcttaagactgtaaacaggcagtgctcttctggccttcaggcagttgcagatgttgccactgctattaaagcagggctctatgacattggtattgctgctggtttggagtccatgacagtgaacaaagttagtcttgatggccaagcgaatcccaaagttgagctattttctcaagcacgtgattgtcttctcccaatgggcctcacatctgagaatgttgcacaccgttttggcataacacgactggagcaagatcaagctgctgttgagtcacatagaaaggctgctgccgcagcagctgctggtaaattcaaagaggaaattgtgccagttcatacaaagattgttgatccaaaaactggtgaggaaaagaagatcgtaatctctgcagatgatggaatccgagtggatacttctcttgcagtcctgtcaaaactcaaaccagcattttcaaaggatggcagcactactgctgggaatgcaagccaagtgagcgatggcgctggggccgtcttgctaatgagacgggatgttgctatgaaaaagggtcttccagttcttggtgtctttaggacctttgccgctgttggagttgatccagctgtaatgggtattggtcctgccgtagcaatccccgcagcagtgaaagctgctggccttcagatggatgatatcgatcttttcgaaatcaatgaggcttttgcatctcagtatgtctactgctgcaagaagttgaaacttgatcctgctaaagtcaatgttaatggcggtgcaatggcccttggacatccgttgggtgctacaggtgcacggtgcgtcagtactcttctcaatgagatgaagcgccgcggcaaggattgccggttcggagtgatttctatgtgcataggttctgggatgggtgctgctgctgtgttcgagcggggagacggcgttgatgagctcaccaatgctcggggaatctcgacccacaactggctttccaaggacgccatgtaaagctacacccaccaaaatttgccggaactggtagcattgtttccagatcgctgtagggagcgaattggggaataaaatgattttgtatttgtcgcccctgctggggatttaggaagatttttacgccactggtatttgaacttgctt

SEQ ID NO: 4912 - DNA, 1809 bp, Oryza sativa Japonica Group
acatctcgcactcgcatcgcagctcccaactccaactcaagtgggctccttcttcccccacaactccacggaaaaaacctcgcagtacacggccacccaccacctaactcccttccttcctctccctagaaatattcccgcatccgcatcccgcatcccgcctggtttgtgattcgccgaacagctttgccgggagaaagcgaggaaggaaggaaggagaggagggagccatggagaaggcgatcaacaggcagagggtgcttctcgcccacctggagcccgccgcgagtcccgccgccgccgcgccggccatcaccgcgagcgcgtgcgccgcgggggacagcgccgcgtaccaccgcggggcgtgcttcgcagacgacgtcgtcatcgtcgctgcctataggacagcaatttgcaagtccaagagaggtggtttcaaggatactcccgcagaggacctcttggttccagtattcaaggctttgatagataaaacgaagttgaacccaagtgaagttggtgatattgttgttggtactgttttagctcctgggtcccaaagggcaattgaatgcagaatggctgcattttatgctggattccctgataccgttcctcttatgactgtaaacaggcaatgttcgtctgggcttcaagcagttgcaaatgttgcttctaacattaaagcaggactttatgacattggtattgctgctggcctagagtccatgacagtgaaccaagttcgccttgatgggcaagtgaaccccaaagttgagctgttttctcaagcacgcgattgccttctcccaatgggcctcacgtccgagaatgttgcaaaacgatttggcataacacgaatggagcaagaccaggctgctgttgagtcccacaggaaggctgcggctgcagctgcttctggtaaattcaaggaagaaattgttccagttcacacgaagattgtggatccaaaaactggtgaggaaaaggagatagtggtctcggcagatgatggaatccgaccaggcacttcattggcagtcctgtcaaaactcaaaccagcattctctaaagatggcaccactactgctggaaacgctagccaagtaagcgatggtgctggagcagtcttactaatgagacgtgacattgctatgcaaaagggtcttccaatagttggcgtcttcaggagctttgcagcagttggagttgatccagctataatgggtgttggtcctgctgttgccatccctgcggcagtgaaagctgctggtcttcaaatagatgatgttgaccttttcgagattaatgaggcctttgcatcacagtacgtatactgctgcaagaagttgggacttgatcctgcaaaagttaacgttaacggaggtgcaatggctcttgggcatccattgggtgctacaggtgcacggtctgtcagtacccttctcaacgaaatgaagcgacggggcaaagactgtcgatttggtgtgatttccatgtgcataggttctggcatgggggctgctgctgtctttgagcgtggggatgcagtggatgagctcactaatgctcggtgcatcccgacccataaccggctttcgaaggacgccatgtaactagaactatatatatatgtcataaaaattgtgcaactgccactattgtttgaaatatcaacacaagagtagggaataaaacgcttgtgtatctgtaatctcatccagctctgaacttggctagttggagaatccttgttaattaggaaattcatgcataataactcaaaagttgtcccttgtcagcctgttc

SEQ ID NO: 4913 - DNA, 2010 bp, Vitis vinifera
gcacagttctggaggttaaatcttatctctcttatttgtcgttatttttccatttattagactataatttgtaattggctttttttttttctttttaaattcagttttccgtctatatatacacatcactgtgcgcccttcccttctcttcccagttttagagagagaggaaatagtgttttagagagagaaatggagaaagccatcaacagacagagagttctgcttcagcatctctccccttcctcttctgcagccgaggatgaatcttctctatccgcatcggtttgtgtggctggggatagtgctgcataccagaggacatcagtttttggagatgatgttgtgatagtggcggcatatcgaactgccttatgcaagtcaaaacgaggaggcttcaaggatacttatcctgatgatctgctggcacctgttttgagggcactgctagagaaaaccaatctgaacccaaatgaagttggggacattgttgttggtacagtattggcgccaggctcccaaagagcaagtgaatgcaggatggctgcattctatgctggtttccctgaaactgtgcctgtcagaactgtgaacaggcaatgttcatctggtcttcaggcagttgctgatgtagctgctgcaattaaagctgggttttatgacattggcattggggcagggttggaatccatgacagcaaatccaatggcttgggaagggtcaatcaaccctaaggtaaaggaatttgtgcaagcccaagattgtcttctccccatgggtattacttcagaaaatgttgcacatcgttttggtgtaacaaggcaggagcaggaccaggctgcagttgagtctcataagcgggctgctgctgcaactgctactgggaaatttaaggatgaaataatcccagtatccaccaagattgttgaccctaaaactggagatgagaaacttgtcacaatctctgtggatgatggaataagacctaacgcaacaatgtcagatcttgcaaagctgaagcctgtatttaagaaaaatgggacaaccacagcagggaattctagccaagtgagtgatggtgctggagctgttctcctcatgaagagaagtgttgcaatgcgtaaagggttacctattcttggtgtattcaggacctttgctgctgttggtgtggatcctgccgtcatgggtattggtccagctgttgcaattccagctgcagtcaaatctgctggcctcgaacttgatgatattgatctttttgaaataaatgaggcttttgcatcccaatttgtatattgccgtaaaaagctggatcttgatccagagaagatcaatgtcaatggaggtgcaatggccattggacatcctttgggtgcaacaggtgcccgctgtgttggtactctattgcatgagatgaagcgccgtggcaaagactgtcgctttggagtggtgtcgatgtgcataggtacaggaatgggagcggcggctgtttttgaaagaggtgactgtgttgatgagcttcgcaatgctcggacggctgaaaacaataatctcttatctaaagatgctcaatagaaccctcatatcatgtcttgcaatggctgtcaataatgtcactgctgggattgagaatcctaataaaagcattgtaataaagatggcattacttttgatatagatacttgaccagagtcctaccgtgtggctgtctgtatctttaccttaaattatattttttttgtttgaagtaatcggagcaatcaaaccacccccccggttgtatggttgtatgcttttaactgataggagatatatagcatatcggcaagtatcatcatttgccttcattcccaattgcacatgccttccaaaccaacaaccccaatttgtaggttttgttatgaagagtgcattttcctattaaaagtatgacaggtgatggtcatgcttttcaaacattaattttaaatttaatctattagaagaaaatctaggtttatgttgggc

SEQ ID NO: 4914 - DNA, 1602 bp, Zea mays
caaccgcgtccggccgtccgcttccgtctccttggataaccacgacgcccgccggcaagcgaaagcgaagcgagccaacccagccatggagaaggcgatcgatcggcagcgggtcctcctggcgcacctcctcccctccccctccgccgcctcctcgcagcctcagcttgcggcgtcggcgtgcgcggccggggacagcgccgcctaccagaggtcctcctccttcggggacgatgtcgtcgtcgtcgctgcctacaggacgccgatatgcaaggccaagcgaggaggcttcaaggacacctacccagaggacctcctcactgttgttctcaaggctgttctggacaacactagaatcaatccagctgacatcggtgacatcgtcgttgggacggtgcttggccctggttcccagcgtgcaaacgagtgcaggatggctgcgttgtttgctggattccctgaaaccgtccctgttagaactgtcaaccgccagtgttcatctgggctacaggcagtagctgatgtcgcagctgctataaaggctggttactatgacatagggattggtgctggtttggaatccatgtccataaattccattgcttgggaaggacaagttaacccaaaaataagcgcattccagaaagcacaggattgtcttctgcccatgggaattacttctgaaaatgttgcccatcgatatggtgtaaccaggcaagagcaagatcaggccgccgctgagtctcataggagagctgctgcagccacggcctctggaaaattcaaggatgagatcgtccccgtgccaacaaagatcgttgatcctaaaactggagaggagaaggaagttgtgatatcagttgatgatgggattaggccagggaccacagcatctggattggcgaaactgaaaccagtttttaaaaaggatgggactacaactgcaggcaattccagtcaagtgagtgatggtgctggagctgttcttctcatgaaaagatctgtggctctgaagaaagggctgcccattcttggtgttttcaggagctttgcggctgttggagtggatccagctgttatgggcgttggtcctgccgtggccattcctgctgctgtgaagtctgcaggccttgagattggagacattgatttgtttgaactgaatgaggccttcgcctctcagtttgtctattgctgcaacaagttggggctggaccgttccaaagtaaatgtaaatggaggcgcgattgcccttggacaccctctgggtgcaacaggtgcccggtgtgtggctactcttctaaatgaaatgaagcgccggggcagagactgcagatttggtgttgtcaccatgtgtatcggatctggaatgggggcagcagctgtgttcgagcggggagacgcggtggatggactctccaacgtgagggacatccaggcacataattttctgtctaaggatgcgaagtagaggcgcagaaaaaacatccatccttgagcagcataagcctgctgcatttgtaatatattcgaaatccgtattttttttcttcacaaacactactctatatacgatgaataaaagggcgacaatacagtgtc

SEQ ID NO: 4915 - DNA, 1814 bp, Zea mays
actagagggtcatggcatggggcatggatggactggtgcgtgtgatcctgatcttgccgagtgcaatcgagatccgtgccagcccgtccatactgcggtggcgtggcggtgacgtgccggcgcggcgcggcgcggcgccgataagaggtagagagaggaaaaaaaagaacaatcaattctccagaccctccccggcaaccgcgtccggccgtccgcttccgtttccttggataaccacgacgcccgccggcaagcgaaagcgaarcraggccaacccagccatggagaaggcgatcgatcggcagcgggtcctcctggcgcacctcctcccctccccctccgccgcctcctcgcagcctcaccttgcggcgtcggcgtgcgcggccggggacagcgccgcctaccagaggtcctcctccttcggggacgatgtcgtcgtcgtcgctgcctacaggacgccgatatgcaaggccaagcgaggaggcttcaaggacacctacccagaggacctcctcactgttgttctcaaggctgttctggacaacactagaatcaatccagctgacatcggtgacatcgtcgttgggacggtgctcggccctggttcccagcgtgcaaacgagtgcaggatggctgcgttgtttgctggcttccctgaaaccgtccctgttagaactgtcaaccgccagtgttcatctgggctacaggcagtagccgatgtcgcagctgctataaaggctggttactatgacatagggattggtgctggtttggaatccatgtccataaattccattgcttgggaaggacaagttaacccaaaaataagcgcattccagaaagcacaggattgtcttctgcccatgggaattacgtctgaaaatgttgcccatcgatatggtgtaaccaggcaagagcaagatcaggccgccgctgagtctcataggagagctgctgcagccacggcctctggaaaattcaaggatgagatcgtcccggtgccaacaaagatcgttgatcctaaaactggagaggagaaggaagttgtgatatcagttgatgatgggattaggccagggaccacagcatctggattggcgaaactgaaaccagtttttaaaaaggatggaactacaactgcaggcaattccagtcaagtgagtgatggtgctggagctgttcttctcatgaaaagatctgtggctctgaagaaagggctgcccattcttggtgttttcaggagctttgcggctgttggagtggatccagctgttatgggtgttggtcctgctgtggccattcctgctgctgtgaagtctgcaggccttgagattggcgacattgatctgtttgaactgaatgaggccttcgcctctcagtttgtctattgctgcaacaagttggggctggaccgttctaaagtaaatgtaaatggaggcgcgattgcccttggacaccctctgggtgcaacaggtgcccggtgtgtggctactcttctaaatgaaatgaagcgccggggcagagactgcagatttggtgttgtcaccatgtgtatcggatctggaatgggggcagcagctgtgttcgagcggggagacgcggtggatggactctccaacgtgagggacatgcaggcacataattttctgtctaaggatgcgaagtagaggcgcagaaaaaccatccatcctagagcagcataagcctgctgcatttgtaatatattcgaaatccgtatcttttttcttcacaagcactactctatatacgatgaataaaagggcgacaatacagtgtcaaaaaaaaaaaaaaaa

SEQ ID NO: 4916 - DNA, 1383 bp, Populus trichocarpa
atggagaaagcaatcaacaggcaacgtgttcttcttgaacacctccgtccttcttcttctcacaattttgaatccactctttctgcatccgcttgtttggctggagatagcgctgcgtatcaaaggacttcggcgtatggagatgatgttgtgattgttgcagcatatcgaactccgcaatgcaaatcaaagcgtggtggtttcaaggatactcatgctgatgatttactagcacctgtgttgaaggcgttaatagagaaaactaatctggatccaagagaagttggggatattgttgtgggttcagtattggctccaggatctcaaagagcaagtgaatgcaggatggctgcattctatgctggtttccctgaaactgtgccgataaggactgtcaacaggcaatgttcgtctgggcttcaggcagttgctgatgtggctgcttcaatcaaagcagggttctatgaaattggcattggagctgggctggaatccatgacaattaatcaaatgtcatgggatggagatgtgaatccaaagctaaagaattttcaaaaagcccaagattgccttctacccatgggtattacttcagagaatgttgcacatcgtttcggtgtgacaaggcaggagcaggatcaggcagcagttgattctcataggaaggctgctgctgctactgcttctggcagattcaaggatgaaatcatccctgtcgctacaaagattgtcgaccctaaaactggtgatgagaagcccatcgtagtatctgttgatgatgggattcgcccagagacatcagtagcaggtctgggaaaattaaagaccgtgtttaagaaagatgggaccaccactgctggaaattctagccaaatcagtgatggtgctggggctgtgttgctcatgaaaagaagtgttgctgtgcaaaaaggactacccattcttggtgtattcaggacatttgctgctgttggtgtggatcctgccatcatgggtgtaggcccagctgttgcaattccagctgcagtgaaggctgctggtttagaacttgaggatattgatctttttgaaataaatgaggcatttgcttcccagtttgtatattgccgcaagaagttggagcttgatccacagaagatcaatgtcaacgggggtgcaatggccattggacatcctctgggtgcaacaggtgctagatgtgtggctaccttactgcatgagatgaagcgtcgtggcagggactgtcgcttcggggtggtgtcaatgtgcataggcacaggaatgggagctgctgctgtttttgaaaggggggatggttgtgatgagctctgcaatgctcggaaagtcgaaagcaacaatctcttatccaaggattcaagatag

SEQ ID NO: 4917 - DNA, 1560 bp, Petunia x hybrida
agtgttgtcttgttctttagtctcttttgtcctaaaatttttctcaataacgatcggaaatctatcatgaaagcaaatggagaggtcaattgaaagacaaagggtgcttctacaacaccttcgtccttctcaaacttcttcttctttggaaaatcttgattcttctatctctgcatctgtatgctctgctggagacagtgctgcttaccagaggacttctgtctttggagatgatgtcgtcatagtcgctgcatataggactcctctatgcaaggcaaagagaggaagcttcaaggatacttatcctgatgatttacttgctccagttttgaaggcactcatggaaaagaccaatgtaagccctagcgaagttggggatattgtcgtcggcacagtgctggccccaggctcccagagagccagcgagtgcaggatggccgcattttatgctggttttcctgaaactgtgccagttaggactgtgaacaggcaatgttcatcaggccttcaagcagttgctgacgtagctgccgctattaaagctgggttttatgacatcggtattggtgctggattggagtcaatgaccactaacccaaggcttggaaggttcagcaacccaaaagtaaagacaatggcacaagctcaagactgtcttcttccgatgggtgttacatctgagaatgttgcacatcgttttggtgtgacaaggcaggaacaagaccaggcagccgttgattcacatcgtaaggctgctgcagctactgcctccgggaaattcaaggatgaaataattcctgtagctacaaagattgttgacccaaaaactggagatgagacaccggtaacaatctctgttgatgatggtatacggccaaatgcctctgtatctgacttggcaaagttgaggccagtattcaagaaggatggaaccactactgctgggaactctagccaagttactgatggtgctggagctgtactacttatgaaaagaagtctggcaatgcagaagggacttcctatcctcggtgtattcaggacctttgctgccgtaggtgtagaccctgccattatgggaattggtccagctgttgcaattcctgctgctgtcaagtctgcaggccttgaacttgaagatattgatctctttgagataaatgaggctttcgcatcacaatatgtttactgccggaagaagctggaacttgacccagagaagatcaacgtcaatggaagcgcaatggcccttgggcatcctttgggtgctacaggagcgagatgtgttgctactctgttacatgagatgaagcgtcgtggaaaagactgccgctttggcgtggtgtccatgtgcataggcactggaatgggggctgctgctgtctttgaaagaggagactcctgtgatgagctgcgcaatgcccgaaaaatcgacagccacaaccttttatccaaagatgctctataaattagagaaagccacacatagtagtactgtcatttacagaacagaacatcaataaatcatgttgctttcagacatgttcttcaaaatatgtg

SEQ ID NO: 4918 - DNA, 1265 bp, Sorghum bicolor
gcacagctgcgcccaccgcggcaaaatatctcgccgtccgtcccgatggacatcgacctcttcgccgacatcgacctcgacgccctcctcgcctccttctccggcgaacccgccgccgtctccgacctcatcgtcccgtccccgcctccgccggccccggcggcgcacgatgcggcggaagcggggtcgccggagtcggtgacctcccgggcgaacccggccggggaggtgggtctctcggagatcgagaggttcctgatgcaggaaggggaggcggaggcggagttgggcggggaggtcgaggggatcagcgtggaccagttcttcgacgcgctgtacgacggcggggaggggaaagatgaaggggaggcagaggcgggggcaagcacggatgcggactccggcagggacgaggtggtggaagtcgtgacgccggaggcggagacggtggaggtggatggcgatgatcccgtcagcaagaagaagaagaggcaaatgaggaacagagattcggcaatgaaatccagggagaggaagaagtcgtacataaaggacttggagacgaagagcaagtatttggaggcagagtgccgccgcctcagctacgcacttcagtgctacgcagctgagaacatggtactgcgccagagcttgatgaaggataggcctgttggtgctcccacagccatgcaggagtctgccgtactcacggaaaccctgccgctggtttccctgctgtggctggtgagcatcgtctgcctcttcctgatgcccgttctgcccaaccgaagcccagctgctccaagcagcggcggaagagatctcgtgatggcagccggaaagacaagcagtgaaaccccagagatactggaactcatcctccatggaaggcgttgcaagagcacgagggcgaggattaagctatataatttaccatttcatccagtaattgcttgctagttgctaggctttcagcctcttgcaagcttacctgtagtagtgtacttgcaattgcaaatcgtagcgtgcccgctatgtgcctgtcatgcagagaagcctgtcgatatccatggagtgggtagtaccttttttctctgttcattttttgtttgtttaatagatcctgtgctatccagtaatagtttaaaacctggattttgtgttatttttctatttcgccaccttgttgctggttgctcctgatatgaagttcctttgctcgaaaatctttggaagtacaatatatggtatgatctgtttatact

SEQ ID NO: 4919 - DNA, 1068 bp, Zea mays
catggacatcgacctcttccccgacatcgaccttgacgccctcctcgcctccttctccggcgaccccgccgccgtctccggcctcatcatcccgtccccgcctccgccggcgccggcgacggcgcacgatgcggaggcggggtcgccggagtcggtgacctcccggacgaacccgctcggggaggtggcgctctcggagatcgagaggctcctgatgcaggagggggaggcggaactgggcggggaggtcgatgggatcagcgtggaccagttcttcgacgcgctgtacgacggcgaggaggcgaaaggtgagcgggaggcgggggcaagcgcggatgtggactccggcagggacgatgtgctggaagtcgtgacgccagaggcggggacggtggaggtggatggcgatgatcccatcagcaagaagaagatgaggcaaatgaggaacagagattccgccatgaaatccagggagaggaagaagtcgtacataaaggacttggagacaaagagcaagcacttggaggcagagtgccgtcgcctcagctacgcacttcagtgctacgcagctgaaaacatggcactgcgccagagcttgctgaaggataggcctcttggtgctcccacagccacgcaggagtctgccgtactcacggaaaccctgccgctggtttccctgctttggctggtgagcatcgtctgcctgttcctgatgcccgttctgcccaaccgaagcccagctgctccaagcagcggcggaagagacctcgtgatggcagccggaaagacaagcagtgagaccccagagatactggaactcatcctccatggaaggcgttgcaagagcacgagggcgaagattaagctatgtattttaccatttcatgcaggagctgcttgctagtagttgctaggctttgagcctcttgcaagcttacctctatatgtagtgtacccgcaaatcttaccgtgctcgctatgcgcctgtcttgcagagaagcctgtcgatatccatggagtagtaccttttttttgtttaatagctcctgtgctacccagaatatgttt

SEQ ID NO: 4920 - DNA, 1097 bp, Zea mays
aatatctcgccgttcccatggacatcgacctcttccccgacatcgaccttgacgccctcctcgcctccttctccggcgaccccgccgccgtctccggcctcatcatcccgtccccgcctccgccggcgccggcgacggcgcacgatgtggaggcggggtcgccggagtcggtgacctcccggacgaacccactcggggaggtggcgctctcggagatcgagaggctcctgatgcaggagggggaggcggagctgggcggggaggtcgatgggatcagcgtggaccagttcttcgacgcgctgtacgacggcggggaggcgaaagatgagcgggaggcgggggcaagcgcggatgcggactccggtagggacgaggcgctggaagtcgtgacgccagaggcggggacggtggaggtggatggcgatgatcccatcagcaagaagaagatgaggcaaatgaggaacagagattccgcgatgaaatccagggagaggaagaagtcgtacataaaggacttggagacaaagagcaagcacttggaggcagagtgccgtcgcctcagctacgcacttcagtgctacgcagctgagaacatggcactgcgccagagcttgctgaaggataggcctcttggtgctcccacagccacgcaggagtctgccgtactcacggaaaccctgccgctggtttccctgctttggctggtgagcatcgtctgcctgttcctgatgcccgttctgcccaaccgaagtccagctgctccaagcagcggcggaagagacctcgtgatggcagccggaaagacaagcactgagaccccagagatacgggaactcatcctccatggaaggcgttgcaagagcacgagggcgaagattaagctatgtattttaccatttcatgcaggagctgcttgctagtagttgctaggctttgagcctcttgcaagcttacctctatatgtagtgtacccgcaaatcttaccgtgctcgctatgcgcctgtcttgcagagaagcctgtcgatatccatggagtagtacctttttttttgtttaatagctcctgtgctacccagaataaaaaaaaaaaaaaaaaa

SEQ ID NO: 4921 - DNA, 2493 bp, Sorghum bicolor
agcagtctgggggaatctgagcctgctgctcacctgagagcctgtggctggggaggcaagcgctgcagaggctgcagagcggtgggagggacgaagacgacgagcctgtcgagcttgtgccgattttgccccccgaatccgtcgttacccctgctttggagggatctgaggctgctgctgcctgccaaagcccagagcggaaaggaggcttgtcgtgctagtggaggaggaggaggaggaggaggaggaggcgtgaaatttcatccataaaggaggctgtgtcccggttggtgagtggagatcgatcgcgctcaattcccgctgaaatcgcctctccggggtgccgtgggaggtggcctggagatgattactttcgtggactcggcggccatggagcgggagcgggagagtgacaggtgcctggacccgcagctgtggcacgcctgcgccggcggcatggtccagatgccgccggtgcactccaaggtgtactacttcccgcagggccacgcggagcacgcgcagggccccgtcgtcgacctccccgccggccgtgtcccggccctcgtcctctgccgcgtcgccgccgtccgcttcatggccgatccggacaccgacgaggtcttcgccaagatccgcctcgccccggtccggcccaacgagccgggatacgctgctgacgccgacgacgccattggcgccgcggcggcgggcggcggcgcgcaagaggacaagcccgcgtccttcgccaagacgctgacgcagtctgacgccaacaacggcggcggtttctccgtgccacgctactgcgccgagaccatcttcccgcggctggactactccgccgacccgcccgtccagaccgtgctcgccaaggacgtgcacggcgtcgtctggaagttccgccacatctaccgcggcacgcctcggcgccacctgctcaccaccgggtggagcaccttcgtgaaccagaagaagctcgtggccggggactcgattgtcttcatgcggacggagaacggggacctctgcgtcggcatccggcgcgccaagaagggtggcatcggagggcccgagttcctgcaccaccaccagccgcccccgccgccgggcggcggcggctacgccgggttctccatgttcctgagaggaggagaagaggacggcagcaagatgatggccacgggcgcggccacgagggggaataaggtcagggtgcgggtgcggccggaggaggtcgtcgaggccgcgaacctcgccgtgagcgggcagccgttcgaggtggtctactacccgagggcgagcacgccggagttctgcgtcaaggctggcgcggtccgcgccgccatgcgcacccagtggtgcgccgggatgcggttcaagatggccttcgagacggaggactcgtccaggatcagctggttcatgggcactgtctccgccgtgcaggtcgctgaccccatcagatggcccaattcaccctggaggcttcttcaggtggcttgggatgaaccggacttgttacagaacgtgaagagagtgagcccatggctggtcgagcttgtctcaaacatgccggccatccaccacctcacgccgttctcgccgccgccgaggaagaagctgtgtgttccactgtacccggagcttccgctggagggccaccagttcccggcgccgatgttccatggaagccctctcggccgtggtgttggcccgatgtgctatttcccggatggcactcctgcaggcatacagggagccaggcatgctcaatttggcatatctttatcagatctccaccttgacaagctgcagtcgagtctgtcaccgcacgggcttcaccaccaccagctggacggccacggcgtgcagccgaggatcgccgctggcctcatcatcggccacccggcagcagctcgagatgacatctcgtgcttgctcaccattggcaccaccccacagaacaggaaaccatcatcagacgtcaagaaggcggcggcggcggcaccgcaactgatgctctttgggaaaccgattctcactgagcagcagatatctctaggcaatgtcgcgggcttcccggcgccgaagaagagcccttctgatgacgttgccgagaggacggtgagcaactcggacgtctcaagccccgggagcaaccatggtggctcgtccaggtccagtggaggagccccgtcgtgccaggacaacaaggtgcctgatctcgggctggagaccggccactgcaaggtgttcatgcagtcggaggatgttgggcgcacgctcgacctctctgctgttggctcgtacgaggagctctaccagaggctcgccgacatgtttggcatcgacaagactgagctgatgagccatgttttctaccgcgacgacgcttctggagcgctcaaacacaccggcgacaagcctttcagtgagttcacgaaaactgcccggaggctgaccatactaacggacgccgagcagcgataa

SEQ ID NO: 4922 - DNA, 3024 bp, Oryza sativa Japonica Group
actcctcttctcctctctttctctctcctttcccctctctctctctctctatttagttcttttgcccccatgtcagctgcagtctgggggaatctgaggctgctgctcacctgagagactgaaaggaggcagaagcagcagcagcatcagcatcagcagcagagcagatagctgagctgcagagggggaggagagaagatagtagtggtagtagtagctgagctgtgtcaagattgcccttcaaattcatcatcttttgctcttgtgagaaaaggtgagtagtggtttctgggttgcgtctccctttttctgcaagatttctgagccaaaattctctcttttgctcgctttgttcccttttctttcttttctttttttcccttcttcctcctttctgctctgctggttggttggttctttctcctcccccagcctttttcagctatgagctctgattgatgatgacgatgatggcggctgtgcagctgaaaagcttcttcaccttgtggtagtggtaaaagctgtgggaaatttcatccataaagatcgccgtggcgctcgaattccgctgaattttgtttgtgctcgagctgatcggtggaggtgaaagatttttgcgtcgaagagatgataactttcgtggattccgcggcgaaggagcgggagcgggagagtgacaagtgcttggacccgcagctgtggcacgcctgcgccggcggcatggtccagatgccgccggtgagctccaaggtgtactacttcccgcaaggccacgccgagcacgcgcaggggcatggccccgtcgagttcccgggcgggcgcgtcccggcgctcgtgctctgccgcgtcgcgggcgtcaggttcatggccgatccggacaccgacgaggtgttcgccaagatccgcctcgtccccgtccgcgccaacgagcagggctacgccggtgacgccgacgacggcattggcgccgccgcggccgcggcggcgcaggaggagaagcccgcgtcgttcgccaagacgctcacgcagtccgacgccaacaacggcggggggttctccgtgccgcgctactgcgccgagaccatcttcccgcgtctcgactactccgccgatccccccgtccagaccgtcctcgccaaggacgtccatggcgtggtctggaagttccgccacatctaccgcggcacgccgaggcgccacctcctcaccacggggtggagcaccttcgtgaaccagaagaagctcgtcgccggcgactccatcgtgttcatgcgcaccgagaacggggatctctgcgtcggcatccgccgcgccaagaaagggggcgtgggaggcccggagttcctgccgccgccgccgccgccgccgccgacacctgccgccggcggcaattacggcgggttctccatgttcctgaggggcgacgacgacggcaacaagatggcggcggcggccaggggcaaggtcagagcccgtgtccggccagaggaggtcgtcgaggcggccaatctcgccgtgagcgggcaaccattcgaggtcgtctactacccgagggcgagcacgccggagttctgcgtgaaggccggggcggtcagagcggcgatgcggacgcagtggttcgccggcatgaggttcaagatggcattcgagacggaggactcatcaaggatcagctggttcatgggcactgtatcggccgtgcaggttgctgaccccattagatggcctaattcaccatggaggcttcttcaggtttcatgggatgaaccggacttgttacagaatgtgaagagggtgagcccatggttggttgagcttgtgtcaaacatgccggccatccaccttgctccattctcgcctccacggaagaagctttgcgtgccgttgtaccccgagcttcccatcgacggccaatttccgacaccgatgttccatggaaacccgctcgcccgtggggttggtcctatgtgctatttcccggatggcactcctgcaggcatacagggagccaggcatgctcaatttggtatatctttatcagatctccaccttaacaaactgcagtcgagtctatcgccccacggccttcaccagcttgatcacggcatgcagccgaggatcgccgctggtctaattatcggtcatccggctgctcgggatgatatctcatgcttgttgaccattggtagcccccagaacaacaagaaatcagatggcaagaaggcgccagcccagctgatgcttttcggaaaacccatactcacagagcagcagatatccttgggtgatgctgcttcggtggatgttaagaagagctcttctgatggtaatgctgaaaatacggtgaataagagtaactccgatgtttcaagcccgagaagtaatcagaatggcaccacagataatttgtcatgtggaggagttccattgtgccaagacaacaaggtacttgatgttgggctggaaacagggcactgcaaggtattcatgcagtcggaggatgtcgggcgcacacttgatctctctgttgttggttcatatgaggaattataccggcggcttgctgacatgttcggcatcgagaaagctgagctgatgagtcatgttttctaccgtgatgcggctggggcactcaagcacactggagatgaacctttcagcgagttcacgaagacggcgcgtaggctgaatatactaacagatacaagcggcgataacttagcgaggtagggtaaattaaagctattctcaattgtacagctggtggagcacggtggcaattttgaaggcaaaaattgccggtttcctagtactggtgcaatttcaaggaggcaattcagttttctttaattagagctcccagaatgggattgactgtaatccggtacccatatttatcggcagatttaccagactggatctatcctactgtcatgtaaaccgatcatattgcatttgatcgttggtgtgtactcggccatgaaccgttactaaacgaatgcgattacgggaatttttgcgcgc

SEQ ID NO: 4923 - DNA, 2100 bp, Oryza sativa
atgataactttcgtggattccgcggcgaaggagcgggagcgggagagtgacaagtgcttggacccgcagctgtggcacgcctgcgccggcggcatggtccagatgccgccggtgagctccaaggtgtactacttcccgcaaggccacgccgagcacgcgcaggggcatggccccgtcgagttcccgggcgggcgcgtcccggcgctcgtgctctgccgcgtcgcgggcgtcaggttcatggccgatccggacaccgacgaggtgttcgccaagatccgcctcgtccccgtccgcgccaacgagcagggctacgccggtgacgccgacgacggcattggcgccgccgcggccgcggcggcgcaggaggagaagcccgcgtcgttcgccaagacgctcacgcagtccgacgccaacaacggcggggggttctccgtgccgcgctactgcgccgagaccatcttcccgcgtctcgactactccgccgatccccccgtccagaccgtcctcgccaaggacgtccatggcgtggtctggaagttccgccacatctaccgcggcacgccgaggcgccacctcctcaccacggggtggagcaccttcgtgaaccagaagaagctcgtcgccggcgactccatcgtgttcatgcgcaccgagaacggggatctctgcgtcggcatccgccgcgccaagaaagggggcgtgggaggcccggagttcctgccgccgccgccgccgccgccgccgacacctgccgccggcggcaattacggcgggttctccatgttcctgaggggcgacgacgacggcaacaagatggcggcggcggccaggggcaaggtcagagcccgtgtccggccagaggaggtcgtcgaggcggccaatctcgccgtgagcgggcaaccattcgaggtcgtctactacccgagggcgagcacgccggagttctgcgtgaaggccggggcggtcagagcggcgatgcggacgcagtggttcgccggcatgaggttcaagatggcattcgagacggaggactcatcaaggatcagctggttcatgggcactgtatcggccgtgcaggttgctgaccccattagatggcctaattcaccatggaggcttcttcaggtttcatgggatgaaccggacttgttacagaatgtgaagagggtgagcccatggttggttgagcttgtgtcaaacatgccggccatccaccttgctccattctcgcctccacggaagaagctttgcgtgccgttgtaccccgagcttcccatcgacggccaatttccgacaccgatgttccatggaaacccgctcgcccgtggggttggtcctatgtgctatttcccggatggcactcctgcaggcatacagggagccaggcatgctcaatttggtatatctttatcagatctccaccttaacaaactgcagtcgagtctatcgccccacggctttcaccagcttgatcacggcatgcagccgaggatcgccgctggtctaattatcggtcatccggctgctcgggatgatatctcatgcttgttgaccattggtagcccccagaacaacaagaaatcagatggcaagaaggcgccagcccagctgatgcttttcggaaaacccatactcacagagcagcagatatccttgggtgatgctgcttcggtggatgttaagaagagctcttctgatggtaatgctgaaaatacggtgaataagagtaactccgatgtttcaagcccgagaagtaatcagaatggcaccacagataatttgtcatgtggaggagttccattgtgccaagacaacaaggtacttgatgttgggctggaaacagggcactgcaaggtattcatgcagtcggaggatgtcgggcgcacacttgatctctctgttgttggttcatatgaggaattataccggcggcttgctgacatgttcggcatcgagaaagctgagctgatgagtcatgttttctaccgtgatgcggctggggcactcaagcacactggagatgaacctttcagcgagttcacgaagacggcgcgtaggctgaatatactaacagatacaagcggcgataacttagcgagg

SEQ ID NO: 4924 - DNA, 1290 bp, Phragmites australis
atggcgcagccggtggtgccggcgatgcagtgtcaggtcggggcgcggggcaaggcggccgtccgggcgaggccggcgggtgcgggaggaagggtgtggggcgtgaagaggagcgggcgcggcacgtccgggttcaaggtgatggccgtgagcacggagagcaccggggtggtgccgcgcctcgagcagctgctcaacatggacaccaagcccttcaccgacaagatcattgccgagtacatctgggttggaggatctggaattgacctcagaagcaaatcaaggacattatcaaaaccagtggaggatccctctgagctaccgaaatggaactacgacggatcaagcacagggcaagctccaggagaagacagtgaagtcatcctatacccccaggctatcttcaaggacccatttcgaggtggcaacaacatattggttatctgtgatacttacacaccagctggggaacccattcctactaacaaacgccacagggctgcacaaatattcagtgacccgaaggtcgtggaccaagtgccatggtttggcattgaacaggagtacactttgctccagacagatgtgaattggcctcttggctggcctgttggaggctaccctggtccccagggtccatactactgcgctgtaggagcagacaaatcatttggccgtgacatatcagatgctcactacaaggcatgtctttacgctggaattaacattagtggaacaaatggggaggtcatgcctggtcagtgggagtatcaggttggacctagcgttggtattgaagcaggagatcacatatggatttcaagatacattctcgagaggatcacggagcaagctggcatagtgcttactcttgatccgaaaccaattcagggtgactggaacggagctggttgccacacaaattacagcacaaagagcatgcgtgaggatggaggttttgaagtgatcaagaaagcaatcctgaacctttctcttcgccatgatctgcatattagtgcatatggagaaggaaatgaaaggaggttgacaggattacatgagacagctagcatagacaacttctcatggggtgtggcaaaccgtggctgctctattcgggtggggcgagatactgaggcaaaaggaaaaggctacctggaagaccgtcgcccggcatcaaacatggacccatatgttgtgacatcgctactggctgaaaccacaattctttgggagccaacccttgaggcggaagctcttgccactaagaagttagcactgaaggtatga

SEQ ID NO: 4925 - DNA, 1677 bp, Oryza sativa Japonica Group
atcgacgtcgcctcctctcctcctcctcctcgtcgctgcattccggttgagtgagttggtgattatctgtagggggtgaaaatggcgcaggcggtggtgccggcgatgcagtgccaggtcggggccgtgcgggcgaggccggcggcggctgcggcggcggcgggggggagggtgtggggagtcaggaggaccgggcgcggcacgtcggggttcagggtgatggccgtgagcacggagaccaccggggtggtgacgcggatggagcagctgctcaacatggacaccacccccttcaccgacaagatcatcgccgagtacatctgggttggaggaactggaattgacctcagaagcaaatcaaggacaatatcaaaaccagtggaggacccctcggagctaccaaaatggaactacgatggatcaagcacagggcaagctccaggagaagatagtgaagtcatcttatacccacaggctatattcaaggacccatttcgaggtggcaacaacatattggttatgtgtgatacctacacaccagctggggaacccatccctactaacaaacgtaacagggctgcacaagtattcagtgatccaaaggttgtcagccaagtgccatggtttggaatagaacaggagtacactttgctccagagagacgtaaactggcctcttggctggcccgttggaggctaccctgggccccagggtccatactactgcgctgtaggatcggacaaatcgtttggccgtgacatatcagatgctcactacaaggcatgtctttatgctggaattaacattagtggaacaaatggagaggtcatgcctggtcagtgggagtaccaggttggacctagtgtcggtattgaagctggagaccacatatggatttcaagatatattcttgagagaataacggagcaggctggtgtagtgcttacccttgaccccaaaccaattcagggagactggaatggagctgggtgccacacaaactacagcaccaagagtatgcgtgaagatggaggatttgaggtgatcaagaaggcaatcctaaacctatcacttcgccatgacttgcatataagtgcatatggtgaaggaaatgaaaggaggttgacaggtttacacgagacagctagcattgacaatttctcatggggtgtggcaaaccgtggatgctctattcgggtggggcgagacaccgaggcgaagggaaaaggctacttggaagaccgtcgcccggcatcaaacatggacccgtacgtcgtgacagcgctattggctgaaaccacaattctttgggagccaaccctcgaagcggaggttcttgctgctaagaagttggccctgaaggtatgaagaacttggacgatgaatcggggcaaataaatcccagcaaaatttgtttgctgcccaccagtcttgatcttgtatttcttctgtctggggattggtctgtacaaatctgcagtttctagaaaaccacgccaccttccattcgccagttaacattttggttgaacaccacacttgatctgggtctgtattttgagtccatttgtgagtgacagaacggatgatgaaacacatcagggacacttttaagtttcttcagtcctgcgtccttccctcgaaataaaaatgtttccttgttttttatcccgggct

SEQ ID NO: 4926 - DNA, 1290 bp, Phragmites australis
atggcgcaggcggtggtgccggctatgcagtgccaggtgggagtgaaggcggcagtccgtgcgaggcctgcggccgcgggggctggcggtagggtgtggggcgtcaggaggagcggccgcggcacgtcggggttcaaggtgatggccatgggcatgtcgacctccggcgtggtgccgcgcctcgagcagctgctcaacatggacaccaagccctacaccgacaatatcatcgctgagtacatctgggttggaggatctggaattgacgtcagaagcaaatcgaggacaatatcgaaaccagttgaggatccctcggagctaccgaaatggaactatgatggatcaagcacagggcaagctccaggagaagacagtgaagtcatcctatatccccaggctatcttcaaggatccatttcgaggtggcaacaacatattggttatctgtgatacatacacgccagctggggaacccattcctactaacaaacgccacagggctgcacaaatattcagcgacccaaaggtcgttagccaagtgccatggtttggcattgagcaggagtacactttgctccagacagatgtgaattggcctcttggctggcctgttggaggctaccctggtccccagggtccatactactgcgcggtaggagcagacaaatcatttggccgtgacatatcagacgctcactacaaaccatgtctttacgctggaatcaacattagtggaacaaacggggaggtcatgcctggtcagtgggagtatcaagttggacctagcgttggaattgaagcaggagaccacatatggatttcaagatacattctcgagagaatcacggagcaagctggtgtggtgcttacccttgatccaaaaccaattcagggtgactggaatggagctggctgccacacaaactacagcacaaagagcatgcgtgaagatggaggatttgaagtgatcaagaaagcaatccttaacctttctcttcgccatgatttgcatattagtgcatatggagaagggaatgaaaggaggttgacagggttacatgagacagcgagcattgacaacttctcatggggtgtggcaaaccgtggctgctctattcgggtggggcgagatactgaggcaaaagggaaaggctacctggaagaccgtcgcccggcatcaaacatggacccatatgttgtgacatcgctactggctgaaaccacaattctttgggagccaaccctcgaagtagaggctcttgccgctaagaagttggcgctgaaggtatga

SEQ ID NO: 4927 - DNA, 1689 bp, Triticum aestivum
ccacgcgtccgcgcgatctcgcaaggtcgttccgccccccttccctccctcctctcctccctcgtctcgtccccgtcgttgtctctctgctagcgctgaaggggaaggcggcggcggagtaagtaagtaagcagcggcgatggcgcaggcggtggtgccggcgatgcagtgccaggtgggcgtgcggggcaggtcggccgtcccggcgaggcagcccgcgggcagggtgtggggcgtcaggaggaccgcccgcgccacctccggcttcaaggtgctggccctcggcccggagaccaccggcgtcatccagaggatgcagcagctgctcgacatggacaccacgcccttcaccgacaagatcatcgccgagtacatctgggttggaggatctggaattgacctcagaagcaaatcaaggacgatttcgaagcctgtggaggacccgtcagagctaccaaaatggaactacgacggatcgagcaccgggcaggctccgggtgaagacagtgaagtcattctatacccacaggccatattcaaggacccattccgaggaggcaacaacatcctggttatctgtgacacctacacgccacaaggggaacccatccctactaacaagcgacacatggctgcacaaatcttcagtgaccccaaggtcactgcacaagtgccatggtttggaatcgaacaggagtacactctgatgcagagggatgtgaactggcctcttggctggcctgttggagggtaccctggcccccagggtccatactactgcgccgtaggatcagacaagtcatttggccgtgacatttcagatgctcactacaaggcatgcctttacgccggaattgaaatcagtggaacaaacggggaggtcatgcctggtcagtgggagtaccaggttggacccagcgttggtattgatgcaggagatcacatatgggcttcaagatacattctcgagagaatcacggagcaagctggtgtcgtgctcacccttgacccaaaaccaatccagggtgactggaatggagctggctgccacacaaattacagcacattgagcatgcgtgaggatggaggtttcgacgtgatcaagaaggcaatcctgaacctttcacttcgccatgacttgcacatagccgcatatggtgaaggaaacgaacggaggttgacagggctacatgagacagctagcatatcagacttctcatggggtgtcgcgaatcgtggctgctctattcgtgtggggcgagagaccgaggcaaagggcaaaggatacctggaggaccgtcgcccggcctcgaacatggacccatacaccgtgacggcgctgctggccgagaccacgatcctgtgggagccgaccctcgaggcggaggccctcgctgccaagaagctggcgctgaaggtatgaaggacctgaaaaggccgaattcttccggggaaaagaaaataaatcggcgggtccgtcgtccattcttgttgatcctgtggttccgtcggggcactgtctgtacaaaatcctcacagtttgtagaaccgctccgcatgttttttcgcttgaactgagtccatttgatctgttgggtctgtacaatccctgtacctgagtccattcggagaactacgttattataaggataatgaatcacacaaaggatttttctttgtgctgctttc

SEQ ID NO: 4928 - DNA, 1872 bp, Hordeum vulgare subsp. vulgare
ggtcgcccccccttccctccctcgcctcgcccgcgtcgccgtctctctggtttaggggccgcggagtcgctgtacgtaagtaagtaagtacgtagagacgacgatggcgcaggcggttgtgcaggcgatgcagtgccaggtgggggtgaggggcaggacggccgtcccggcgaggcagcccgcgggcagggtgtggggcgtcaggagggccgcccgcgccacctccgggttcaaggtgctggcgctcggcccggagaccaccggggtcatccagaggatgcagcagctgctcgacatggacaccacgcccttcaccgacaagatcatcgccgagtacatctgggttggaggatctggaattgacctcagaagcaaatcaaggacgatttcgaagccagtggaggacccgtcagagctgccgaaatggaactacgacggatcgagcacggggcaggctcctggggaagacagtgaagtcatcctatacccacaggccatattcaaggacccattccgaggaggcaacaacatactggttatctgtgacacctacacaccacagggggaacccatccctactaacaaacgccacatggctgcacaaatcttcagtgaccccaaggtcacttcacaagtgccatggttcggaatcgaacaggagtacactctgatgcagagggatgtgaactggcctcttggctggcctgttggagggtaccctggcccccagggtccatactactgcgccgtaggatcagacaagtcatttggccgtgacatatcagatgctcactacaaggcgtgcctttacgctggaattgaaatcagtggaacaaacggggaggtcatgcctggtcagtgggagtaccaggttggacccagcgttggtattgatgcaggagaccacatatgggcttccagatacattctcgagagaatcacggagcaagctggtgtggtgctcacccttgacccaaaaccaatccagggtgactggaacggagctggctgccacacaaactacagcacattgagcatgcgcgaggatggaggtttcgacgtgatcaagaaggcaatcctgaacctttcacttcgccatgacttgcacatagccgcatatggtgaaggaaacgagcggaggttgacagggctacacgagacagctagcatatcagacttctcatggggtgtggcgaaccgtggctgctctattcgtgtggggcgagacaccgaggcgaagggcaaaggatacctggaggaccgtcgcccggcctccaacatggacccgtacaccgtgacggcgctgctggccgagaccacgatcctgtgggagccgaccctcgaggcggaggccctcgctgccaagaagctggcgctgaaggtatgaaggacctgaaaaaaggacgaattcttcttccggggaaaagaaaataaatcggcgagcggcgagaccgttggccgtccattcttgttgatcctgtggttccgtcggggcactgcctgtacaaaatcctcacagtttgtagaaccactcccgcgtgtgtttttccgcttgaactgagtccatttgatctgttgggtctgtacactcactgtacctgagtccatttggagaactacgttattataaaacgataatgaatcgcatagaggatctttttttcttcttcttctttgctttcagcttggttcgtgtgtaaatctcgttgtcccgtacgagagtacgaagctgtgggacgccactatggccactggaggacggtggtccgtttgtaggtggtggctgccggctgccggctgccattgttgcccggcggcactgcctctctttctctctcagctcgaggacacactctgaagaaatgggacaag

SEQ ID NO: 4929 - DNA, 3536 bp, Triticum aestivum
gcagtgccaggtgggcgtgcggggcaggtcggccgtcccggcgaggcagcccgcgggcagggtgtggggcgtcaggaggaccgcccgcgccgcctccggcttcaaggtgctcgccctcggcccggagaccaccggcgtcatccagaggatgcagcagctgctcgacatggacaccacgcccttcaccgacaagatcatcgccgagtacatctggtacgtgcgcactgctacgcgcccttccccgcaaatgtcgccgctcttttctcgtcagcggaccctgttcgcttccatggattgattgacttccatgagagcactctagtactgtagtagcttgggataggccaagcctgcactttcaggggattacactggattagattagattagattagattagcacgggagcgagcagtgcagtgcggatttgcacccttaaagtcgatactcactgctaataatagacaaagttttcaaggcctggtgggtgatttgtcttttgccctttttagttcccgcacttgaataagatttagcaggggagtggacacaccacttttggggagcaaccaggagtcgatcctgtcatgccatgcaccactattatgtttctagtagcattttactgttaacaaatctgaccatttcgccttttctttctttctttcttcgctttgtgcagggttggaggatctggaattgacctcagaagcaaatcaagggtactcaccccatatcttcatgctcatcacgattatcgctgtttccttgcatgcatagtttgcactagtgttcttccgggatgagcagtcatttttctccacaagtttaggggatgagcagttgactgcagagtattgtttctctacttcctatttttgctactgacaagaaaatgcaatgctactgtttcagacgatttcgaagccagtggaggacccgtcagagctaccgaaatggaactacgatggatcgagcacaggccaggctcctggagaagacagtgaagtcatcctatagtaagcgggaaattactgtccatgttttcggcttttgcagccttgcgcacacagagtattctagattttggcttttgctaactctgttcatgtttttctatcctgctttcagcccacaggccatattcaaggacccattccgaggaggcaacaacatactggtacctttctgaatgtgctttatgttaatcatgaagagatgattaataccagtggtcactttactggttacatgtgtaaaatcggcttgttagttaatacggaatttggtttttcaggttatctgtgacacctacacaccacaaggggaacccatccctactaacaaacgacacatggctgcacaaatcttcagtgaccccaaggtcacttcacaagtgccatggtaactaagtgtcgagtaactctgtgctacataaaaaacctgctatttttttagctcacatttgtttgcacacgaagttgaaacatttgcttttctaggtttggaatcgaacaggagtacactctgatgcagagggatgtgaactggcctcttggctggcctgttggagggtaccctggcccccaggtactgcatcaagaggcttgatttaccagatgacgataaatcttaggctgactgaaatatacacttcattgaacaaacaaccaagtagtaatatttttgctgaaatgttgcagggtccatactactgcgccgtaggatcagacaagtcatttggccgtgacatttcagatgctcactacaaggcatgcctttacgccggaattgaaatcagtggaacaaacggggaggtcatgcctggtcaggtatgcctccgtatttatatgcgtgcatgaattattcttgttatgtgtgaatcagcgtgatgtttttgacctcttcttttaaaggaaaatcgaactgtttaataactgaaaatttacaacctgtattcatgcagtgggagtaccaggttggacccagcgttggtattgatgcaggagatcacatatgggcttcaagatacattctcgaggtacttcaaacaactatccatggtcccctgatggcctgatatcacagtgtttttgttatttgcttttaattagcataatatgactaataagtcgactctcttttttacattatcgaaaacccgataggtgcatgtgctatgagtttatgatttattttgacactttgaagaatgcccttcgtaaataccataaaaacagttttcactaaaacatcaaatctcataaatccacaactgatcaggtgaccattctttgtgatattattttctcattaataagacttctaattatcgtcctactcactgttatcagagaatcacggagcaagctggtgtcgtgctcacccttgacccaaaaccaatccaggtatattcctgtaagttgtttgaagcactttatatattagaaattactagtctgaagatttatctgatgtagggtgactggaatggagctggctgccacacaaattacaggtttcactcttttctgttaatatttgttcatctggtgtaacttttataaagtatatcttgccgtgtttttcttaagaaacctatatcttgccacatgtatatattaaaaaaaaatcagaaaacctattgcagctgactagttgtgttgaagtaaatactaagtgaaaatattcctcgagatactatatttcaaacagggcatggatgttcagtgttggttattttagaattattatcatatgttattcagaatagacatgtatttactaacgtttttagtagtttttctcaatacccgatagagcatcaccttaatttgcaagtgataaaccgtgttgtcttgttgttgcaaatgtagcacattgagcatgcgtgaggatggaggtttcgacgtgatcaagaaggcaatcctgaacctttcactccgccatgacttgcacatagccgcatatggtgaaggaaacgaacggaggttgacagggctacatgagacagctagcatatcagacttctcatgggtatggctggagcaaaccttttctttcatttttagttgtattttacttcctgtttatttgcaagttatactgatcataacactttgtttatcagggtgtcgcgaatcgtggctgctctattcgtgtggggcgagagactgaggcaaagggcaaaggtatttgctctcccttgttctgcaaaactttgcaatggttgggaatgcagaaaaagaattatgacatcccaaataaaattcaagtacattgggcaagcctaagtcttgcggagcagaaaaggaattatgacaacccaaataaaattcaaattaacctcttgcatatattatactggtaatctgctgtcacctatgtgttgtagcttggtagtctgcatttttgaactgaaaacgataccttgttgcccaacaggatacctggaggaccgtcgcccggcctcgaacatggacccatacaccgtgacggcgctgctggccgagaccacgatcctgtgggagccgacc

SEQ ID NO: 4930 - DNA, 3762 bp, Triticum aestivum
ggcgcaggcggtggtgccggcgatgcagtgccaggtgggcgtgcggggcaggtcggccgtcccggcgaggcagcccgcgggcagggtgtggggcgtcaggaggaccgcccgcgccgcctccgggttcaaggtgctggccctcggcccggagaccaccggcgtcatccagaggatgcagcagctgctcgacatggacaccacgcccttcaccgacaagatcatcgccgagtacatctggtacgtgcgcactactacgcgcccttccccgcaaatgtcgccgctgttttctcgtcgcgcgcgtccatcgcggccggcggaccctgttcgctcgcttccatggattgatggtttgacttccatgagagcacagcacggcagtgctactgtagtagtggcttgggatatgccaagcctgcactttcatgggattacactagattagattagattaggacgggagcgagcagtgcagttcggatttgcacccttaaagtcgatactcactgctaataatagacaaagctttcaaaggcctggtgggtgatttgtgacgactcactcactgcttttgcctttttagttcccgcacttgaataagattttggggactggacaccccacttttggggtgcaaccaggagtcgatcctgtcatggcatgcaccaactattatgtttgtagtagcattttactgttaacaaatctgaccttttctctttttctttctttcttcgcattgcgcagggttggaggatctggaattgacctcagaagcaagtcaagggtacgcgttcgatatcgtgatggtcatcacaactaacaatgtttccttgcatacatattttgtagtgttcttacgggacgaacagttgtttctctccaaaattttaggggatgagcagttcacttccgagtattgtttctgtactttctatttctgccactgacaagaaaatgtaatgctactgtttcagacgatttcgaagcctgtggaggacccgtcagagctaccaaaatggaactacgacggatcgagcaccgggcaggctccgggtgaagacagtgaagtcattctatagtaagggggaaattgttgtccatgtgttcttcagccttgcacatacagagtattctagatttcggcttttgctaactctgttcatgtttttctgtcctgctttcagcccacaggccatattcaaggacccattccgaggaggcaacaacatcctggtacctttctctggatttgctttacgctaatcatgaagaaatgattagtaccagtggtcactttactggttacatgtgtaaaatcggcgtgttatttaatacggaatttggtttttcaggttatctgtgacacctacacgccacaaggggaacccatccctactaacaagcgacacatggctgcacaaatcttcagtgaccccaaggtcactgcacaagtgccatggtaactagtgcatttgagaacctctgcctatataaaaccctgctattgtttgcacacgaagttgaaacatttgcttttctaggtttggaatcgaacaggagtacactctgatgcagagggatgtgaactggcctcttggctggcctgttggagggtaccctggcccccaggtacttcatccagaagcttgatttaccagatgacgataaatcttaggctgactgaaatatacacttcattaaacacaaccgggtagtaatatttgtgctgaaatgttgcagggtccatactactgcgccgtaggatcagacaagtcatttggccgtgacatatccgatgctcactacaaggcctgcctttacgcgggaattgaaatcagtggaacaaacggggaggtcatgcctggtcaggtatgcctccgtattgataggcgtgcatgtattcttgttatgtgtgaatcagtattacgtttttcacctcttctttcaaaggacaatcgaactgtttaataagttgaaattcacaaccattattcatgcagtgggagtaccaggttgggcctagtgttggtattgatgcaggagaccacatatgggcttcaagatacattctcgaggtactttgaacaattctctatggttctctgatggcctgatatcagagaaccttggttgttccctttagttatcagaatataagtcaactggtttgttatattatggtagacccaataggtgcatgtgtatgagtttttatgatttattctgacactctgaagaattcccttcttaaataccataaaaccagttttcgctgaaacatcagattccataagtccatgactgaccgaatgagcatccttttgttgatattaacttttgcattactaagcacttctaattatcatcctactcactgtaatcagagaatcacggagcaagctggtgtggtgctcacccttgacccaaaaccaatccaggtatatacttgtaagttgtttgaagcaatttatatattagaacttagtaatctgaagattgatatgatgtagggtgactggaatggagctggctgccacacaaattacaggttccactcttttctgttaatatttatttatcccgcataacttttacaaagtatatcttgccgagtatttttttcaagaaacctatattaaaaaaaaatcagaaaacctattatagctgtattgaagtagatacagcgtggattttgtgggaagataacatatgctgatactaaaagacaatgttcctcgaaatactactccctccgttcctaaatataagtctttgtagagatttcactataaaccacatacggatgtatgtagatgcattttagagtgtagattcactcattttgcttcgtatgtagttcatagtaaaatctttacaaagacttatatttaggaacggagggagtatatgtcaaacatggcttgaatgtgcagtgttggttatttaaacttattatcaagtgttattcagaatagacatgtattcagtatagttactaacttttttggtagtttttttctcaatgcttgaatgtgcagtgttggttatttaaacttattatcaagtgttaatttgcgagtgagaaacaattttttcttgttgttgcaaatgtagcacattgagcatgcgtgaagatggaggtttcgacgtgatcaagaaggcaatcctgaacctttcacttcgccatgacttgcacatagccgcatatggtgaaggaaacgagcggaggctgacagggctacacgagacagctagcatatcagacttctcatgggtatgggtggagcaaaacttttctttcatttttagttgtgttttccttcctgtttatttacatggtgtgctaatcaaaacactttatttatcagggtgtcgcgaaccgtggctgctctattcgtgtggggcgagaaaccgaggcaaagggcaaaggtatttgctcccctttgttctgcaaaactacttgcaatggttgggaatgcagaaaaagaattgtgacatcccaaataaaattcaagtacattgggcaagcctaattcttgcggagcagaacaggaattacgacaaataatcctcttgcgtatattgtactggtatatatatcggcacctatgtgtcgtagcttggtaatctgcatttttgaactgaaaacgataccttgtttgcccaacaggatatctggaggaccgtcgcccggcctcgaacatggacccatacaccgtgacagcgctgctggccgagaccacgatcctgtgggagccgacc

SEQ ID NO: 4931 - DNA, 1549 bp, Hordeum vulgare subsp. vulgare
tggcgcaggcggttgtgcaggcgatgcagtgccaggtgggggtgaggggcaggacggccgtcccggcgaggcagcccgcgggcagggtgtggggcgtcaggagggccgcccgcgccacctccgggttcaaggtgctggcgctcggcccggagaccaccggggtcatccagaggatgcagcagctgctcgacatggacaccacgcccttcaccgacaagatcatcgccgagtacatctgggttggaggatctggaattgacctcagaagcaaatcaaggacgatttcgaagccagtggaggacccgtcagagctgccgaaatggaactacgacggatcgagcacggggcaggctcctggggaagacagtgaagtcatcctatacccacaggccatattcaaggacccattccgaggaggcaacaacatactggttatctgtgacacctacacaccacagggggaacccatccctactaacaaacgccacatggctgcacaaatcttcagtgaccccaaggtcacttcacaagtgccatggttcggaatcgaacaggagtacactctgatgcagagggatgtgaactggcctcttggctggcctgttggagggtaccctggcccccagggtccatactactgcgccgtaggatcagacaagtcatttggccgtgacatatcagatgctcactacaaggcgtgcctttacgctggaattgaaatcagtggaacaaacggggaggtcatgcctggtcagtgggagtaccaggttggacccagcgttggtattgatgcaggagaccacatatgggcttccagatacattctcgagagaatcacggagcaagctggtgtggtgctcacccttgacccaaaaccaatccagggtgactggaacggagctggctgccacacaaactacagcacattgagcatgcgcgaggatggaggtttcgacgtgatcaagaaggcaatcctgaacctttcacttcgccatgacttgcacatagccgcatatggtgaaggaaacgagcggaggttgacagggctacacgagacagctagcatatcagacttctcatggggtgtggcgaaccgtggctgctctattcgtgtggggcgagacaccgaggcgaagggcaaaggatacctggaggaccgtcgcccggcctccaacatggacccgtacaccgtgacggcgctgctggccgagaccacgatcctgtgggagccgaccctcgaggcggaggccctcgctgccaagaagctggcgctgaaggtatgaaggacctgaaaaaaggacgaattcttcttccggggaaaagaaaataaatcggcgagcggcgagaccgttggccgtccattcttgttgatcctgtggttccgtcggggcactgcctgtacaaaatcctcacagtttgtagaaccactcccgcgtgtgtttttccgcttgaactgagtccatttgatctgttgggtctgtacactcactgtacctgagtccatttggagaactacgttattataaaacgataatgaatcgcatagagg

SEQ ID NO: 4932 - DNA, 1673 bp, Hordeum vulgare subsp. vulgare
ggtcgcccccccttccctccctcgcctcgcccgcgtcgccgtctctctggtttaggggccgcggagtcgctgtacgtaagtaagtaagtacgtagagacgacgatggcgcaggcggttgtgcaggcgatgcagtgccaggtgggggtgaggggcaggacggccgtcccggcgaggcagcccgcgggcagggtgtggggcgtcaggagggccgcccgcgccacctccgggttcaaggtgctggcgctcggcccggagaccaccggggtcatccagaggatgcagcagctgctcgacatggacaccacgcccttcaccgacaagatcatcgccgagtacatctgggttggaggatctggaattgacctcagaagcaaatcaaggacgatttcgaagccagtggaggacccgtcagagctgccgaaatggaactacgacggatcgagcacggggcaggctcctggggaagacagtgaagtcatcctatacccacaggccacattcaaggacccattccgaggaggcaacaacatactggttatctgtgacacctacacaccacagggggaacccatccctactaacaaacgccacatggctgcacaaatcttcagtgaccccaaggtcacttcacaagtgccatggttcggaatcgaacaggagtacactctgatgcagagggatgtgaactggcctcttggctggcctgttggagggtaccctggcccccagggtccatactactgcgccgtaggatcagacaagtcatttggccgtgacatatcagatgctcactacaaggcgtgcctttacgctggaattgaaatcagtggaacaaacggggaggtcatgcctggtcagtgggagtaccaggttggacccagcgttggtattgatgcaggagaccacatatgggcttccagatacattctcgagagaatcacggagcaagctggtgtggtgctcacccttgacccaaaaccaatccagggtgactggaacggagctggctgccacacaaactacagcacattgagcatgcgcgaggatggaggtttcgacgtgatcaagaaggcaatcctgaacctttcacttcgccatgacttgcacatagccgcatatggtgaaggaaacgagcggaggttgacagggctacacgagacagctagcatatcagacttctcatggggtgtggcgaaccgtggctgctctattcgtgtggggcgagacaccgaggcgaagggcaaaagatacctggaggaccgtcgcccggcctccaacatggacccgtacaccgtgacggcgctgctggccgagaccacgatcctgtgggagccgaccctcgaggcggaggccctcgctgccaagaagctggcgctgaaggtatgaaggacctgaaaaaaggacgaattcttcttccggggaaaagaaaataaatcggcgagcggcgagaccgttggccgtccattcttgttgatcctgtggttccgtcggggcactgcctgtacaaaatcctcacagtttgtagaaccactcccgcgtgtgtttttccgcttgaactgagtccatttgatctgttgggtctgtacactcactgtacctgagtccatttggagaactacgttattataaaacgataatgaatcgcatagaggatctttttttcttcttcttc

SEQ ID NO: 4933 - DNA, 2433 bp, Zea mays
cgtcgtcaagtgctggcgccggcgggctggctccctggcaccggcgccgccgccccggacatggccggagcgccgtcgtcgctagcgcgcctcctcctcctcctcctgctagctgccggatgcctcctcccgctggtcgctgacgccgcgcggctcacgctgtccctcgcgcccgccgccgacgcgctcctcaggctcaaggccggcattaaggacgacggcggcgcgctcggcagctggtcccccgacacgagcccctgcgccgacggcgggcccagctggaagggcgtcctgtgcaacaaggacggcgtgcacggcctgcagctcgaggggatgggcctctccggcacgctcgacctgcgcgccctcaccagcctgcccggccccggcctccgcacgctgagcttcatgaacaacgagttcgccggcccgttgcccaacgtcaaagagctcagcggcctccgcgctgtctttctgtccgagaacaagttctccggtgtcatccccgccgacgcgttcgccgggatgggctcgctcaagaaggtggtcctgtccaataacgacttcactggccccatcccggcgtcgctcgccgacgcgcccaggctcctggagctgcgcctcaacgacaacaagtttcagggcaagatcccggacctgaaacaggaggagttgacggaagtcaacctcgcaaacaatgagctcgagggggagatcccggcgagcctcaaatccatgacatcggacatgtttgccggcaacaagaagctttgcggcccgccgctcggtgccaaatgcgaggcccccccgacgccgtcaccaaaggcgcatccgcaggcctccgtcaaagaaggcaccacgccgtcacaagcagcagcagacaccgtggcatccacgggcgcgtcgtcagcagacgacccgaagcaagacgaaggccaggagcccgtcgagggctccatttcgttcggcgtctccgccgcgttgcttggcacgcttttgatcgccggcgtggcgttcatcgcgctgcggaggcggagggggtacaaaaccaagaacttcggcccgaccgcgtcgtcgtctcgcccctcggggccgccaagggtcgagccgcacccgccggcggcaaaggcgcccgccgccgccgggggcgtggcgcacggcggcggcgcggcgcggaaggcggagcaggggcgactgacgttcgtgcgcgacgaccgcggccggttcttcgagctgcaggacctgctcaaggcgacggcggaggtgcttggcgccgccaacctcggcgtgtgctaccgcgccacgctcacgacgggccagtccgtcgtcgtgaagcggttcaaggagatgaaccgggtgggcagggaggacttcgaggagcacatgcggcggctgggccgtctcagccaccccaacctcctcccgctcgtcgcctactactaccgcaaggaggagaagctgctcatccacgactacgtccccaaccggagcttggcgaacctcctccatggcggcggcgagagcggcgggatgaagaaggcggcggtgcactgggcagcgcggctgaagatcgtgaagggcgtggcgcgggcgctcagctacctgtacgacgagctgtgcatgctcacggtgccgcacggccacctcaagtcgtccaacatcctgctcgacgcccaccacgggccgctgctgacggactacgcgctggtgccggtgatgaaccagtcgcacgccgcgcagctcatggtggccttcaagtccccggagcggaagcagttcggccgctcgtccaagaagagcgacgtctggtgcctcggcctgctcatcctcgagatactcactggaaggccgccgacctacgacccgcccaaggcggcggcgccctcaggcgagctgtcgtcgtcccagcagaagccggggccggcggcgggcaacaccgacctggtgaccgtcgtggggtcgacgccggagggcgagtggctgaacaccgtggtggaccgggacctgcggggcgaggaggaggaggacaaggaggagatggtgaagctgatcagggtcggcatggcgtgctgcgagagcaacgtggacaaccggtgggagctcaagaccgccatcgagaggatcgaggagctcaaggcgaaggagcgccccgacgaggagcaagcgacggtgatcgacgaggactacagcgatgttgccctcaactgatcatcgacacgaaccggccgggaatcgatcgatagggagggttgtgcgcaagctgatgatatgagcccaaaatgtgatgacctgcatgcatgccgagaccctaaacatggactagtactgtgtattcttatatacctttgctggttgttaattgccggtggtaggtttttggagagaaaagaagctacttatatataatcacacagatcttagtttgcttttttc

SEQ ID NO: 4934 - DNA, 3416 bp, Zea mays
acaaccccggacgactgtggacatgatgatccatcttataatagtataacacacatttatacataagttatcacgatattttattttcccgttgtaacgcatatggactcaactagttaatatttaaacatttaggtaacccgatcagtcaaacacctctttcagttttgtccgactatcgtatgtcagagaagagctgttgaaatgacgacgacgacctcactattcctattcttgaccaaagccagcaaccgcaggcgcaaataccccgagccatgcgggcgcctcgtctctcgccaccagcccactgcccaccaccctggccgcgcgcgcgtgcgcgcgcggggagctcctgaatcctctctctcctcccctttctccgcctcactttctctctcttcgcgtcgacctcccgctctccagggaaaacaacgtgccggccagccttccccgcccacgcgcgcccgggaacaggggccacccgcagcattgccgccggccaattcacccgccgtcgtcaagcgctggcgccggcgggctggctctctggcgccgccgccccagacatggccggagtgccatcgtcgctagcgcgcctctacttcctcctcctcccgctagccaccggatgcctcctcctgctgtctgctgaagccgcgcggctcccgctgtccctcgctcccgccgacgccgcggccgacgcgctcctcaggctcaaggctggcatcaacgacagcggcggcgctctcggcagctggtcccccgacacgagcccctgcggcgacggagacggcgggggggccagctggaagggcgtcatgtgcaacagggacggcgtgcacggcctgcagctcgaggggatgggcctctccggcgtgctcgacctgcgcgccctcacgagcctgcccggccccggcctccgcacgctgagcttcatggacaacgatttcgccggcccgttgcccgacgtcaaggcgctgagcggcctccgcgctctttttctgtccgggaacaagttttccggcgtgatccccgccgatgcgttcgccgggatgggctcgctaaagaaggtggtcctctccaataatgacttcaccggccccatcccggcgtcgctcgccgacgcgccccggctcctcgagctgcagctcaatggcaacaagtttcaggggaagatccctgacctgaaacaggacgagctgacggcagtcaacctcgcaaacaatgagctcgagggggagatcccgccgagcctcaaattcacgccgcctgacatgtttgccggtgagcaacatggatttctagttttctacaccatgcatgcatgctgttcgtgcaatgtccacgtgcaatgcagcagccatatgatcttgttgttctacaataatgcatgcaggcaacaccaagctttgcggcccaccgcttggtgtcaaatgcgaggcccctccgccgccgtcagcgtcgccgtcgccatcaccgccgccgtcaccgaagacaccgcctccagcctccgtcaaagaaggcaccacgccatcccaaccagcagcagacaccgtggcgtccacaggcgcgtcgtcagctgacgatgcgaagcaagacgagggccataagcccgtcgagggctccacctccacgtcgttcggcgtcctcgccgcattcattggcacgcttgggatcgccggcgtggcgttcgtcgcgctgcggaggcgacgggggtacaagaccaagaacttcggcccgaccgcgtcgtcggctcggccctcggatccgccgagggtcgagccgcacccgccggcggcgaaggccgaagccagcgcggcgcaggcgccccctgccgccgccgggtgcgtggcgcgcgctggcggcgcggcgcggaaggtggagcaggggcggctgacgttcgtgcgcgacgaccgcggccggttcttcgagttgcaggacctgctcaaggccacggcggaggtgctcggcaccgccaacctcggcgtgtgctactgcgccacgctcacgacgggccactctgtcgtggtgaagcggttcaaggagatgaaccgggtgggcaaggaggacttcgaggagcacatgcggcggctgggccggctcagccaccccaacctcctcccgctcgtcgcctactactaccgcaaggaggagaagctgctcatccacgactacgtccccaaccggagcttggcgaacctcctccatggtgagtactctactgttcatctccggcttcgtcgtgatcgtcgtcatcgagcatccctctaaccttttgctggtcggatgcttccttgcctggtgttggcgcgttcgttcgcacaggcggcggcgacgagcgcgggatgaagaaggcggcgctgcattgggcggcgcggctgaagatcgtcaagggcgtggcgcgggcgctcagctacctgtacgacgagctgtgcatgctcacggtgccgcacggccacctcaagtcgtccaacatcctgctcgacggccactacgagccgctgctgacggactacgcgctggtgcctgtgatgaaccagtcgcacgccgcgcagctcatggtggccttcaagtccccggagcggaagcagttcggccgctcgtccaagaagagcgatgtctggtgcctcggcctgctcatcctcgagatgctcaccgggaagccgccgacctacgacctgcccaaggcggcgggggcggtgccgtcggccgaatcgttgtcgtcaccgcagaagccgggtccggcggcgggcaacggcacggacctggtgaccgtcgtggggtcgacgccggagggcgagtggctggacaccgtggtggacccggacctgaggggcgaggaggaggaggacaaggaggagatggtgaagctgataagggtcggcatggcgtgctgcgagagtaacgtggacagccggtgggagctcaagaccgccatcgacaagatcgaggagctcaaggcgaaggagcgccccgcccccgacgaggagcaggccttctactcgacggtgaacaacgaggacttcaacgacgttgccatcaactgaactgacgatcgacatggactgggaatagatttcatcgcacaccaccgacgacgaatttccaaacaactcaacagaaatctattacaaattaattaattaatatgttgaatggataatggaaggatctattttgtgcaaattatcaagtgttggggcacacaaaacgtccgttctttgaaattttcatccacacgagtgaactttgttttaaaaaaccataaatatatatgtgttctattgttaggtggacctagatgtgcaaacaatatttttatagtaccgctgaaagggaaaaaaaacgtaatatcgcttagtgtccatcgacccatcgtaatagaattagccgatccttaatcttctatcttattg

SEQ ID NO: 4935 - DNA, 2226 bp, Sorghum bicolor
atggcccgagtgccatcgttgctgctagcgcgcctcatcttcctcctcttgctcctgctggtcgctgacgccgcgcggctcccgctgtccctcgcgcccggcgacgacgccgccgcctccgacgcgctcctcaagctcaaggccggcatcaaggacgaagacggcgcgctcggctcctggtcccccgacacgagcccctgcggaggagatggcaacggcggggggaccacctggatgggcgtcatgtgcaacaaggacggcgtgcacggcctgcagctcgaggggttgggcctctccggcaagctcgacctgcgcgccctcaagagcctgcctggccccggcctccgcacgctcagcttcatggacaacgagttcgccggaccgttgcccgacgtcaaggagctcagcggcctccgcgctgtctttctgtccgggaacaagttctccggggtcatccccgccgacgcgttcgccgggatgggctcgcttaagaaggtggtcctgtccaacaatgaattcaccggacccatcccgccgtcgctcgccgacgcgcccaggctcctggagctgcagctcaatgacaacaagtttcagggcaagatccctgacctgaaacagggcgagttgacgcaagtcaacctcgcaaacaatgagctcgagggggagatcccggcgagcctcaaatccatgtcacccgacatgttcgccggcaacaagaagctttgcggcccaccgctcggtgccaaatgcgaggcccctccgccgccgtcgccgtcaccaaaggcaccaccgccgtcgcagtcaccaaaggcgccgccggcgacctccgccaaagaagggaccacaccgtcggtaccagcagcagacatcgtggggtctacaggcgcgtcgtcagctgacgacgcgaagcaagacgaggcccagaagcccgccgagggctccacgtcgttcggcgtcctcgccgcgttccttggcgcgcttgcgatcgccggcgtggcgttcgtcgcgctgcgcagacggagtgggtacaagaacaagaacttcggcccgaccgcgtcgtcggctcggccctcggggccgccgagggtcgagccgcacccaccggcggcgaaggctcaagcaagcgcggcacaggcgaccggcgccgccgacgggtccgtgtcccgcggcggcggcgcggcgcggaaggtggagcaggggcggctgacattcgtgcgcgaagaccgcggtcggttcttcgagctgcaggacctgctcaaggcgacggcggaggtgctgggcacggccaacctcggcgtgtgctactgcgccacgctcacgtcgggccactccgtcgtcgtgaagcggttcaaggagatgaaccgggtgggcagggaggacttcgaggagcacatgcggcggctgggccggctcagccaccccaacctcctcccgctcgtcgcctactactaccgcaaggaggagaagctgctcatccacgactacgtccccaaccggagcttggcgaacctcctccatggcggcggagagggctgcgggatgaagaaggcggcggtgcactgggcggcgcggctgaagatcgtcaagggcgtggcgcgggcgctcagctacctgtacgacgagctgggcatgctcacggtgccgcacggccacctcaagtcgtccaacatcctgctcgacggccactacgagccgctgctgacggactacgcgctggtgccggtgatgaaccagtcgcacgccgcgcagctcatggtggccttcaaggccccggagcggaagcagttcggccgctcgtccaagaagagcgacgtctggtgcctcggcctgctcatcctcgagatgctcaccgggaagcagccgagctacgacctgcacaagccctcgggcgagtcgtcgtcgtcgtcaccgccgcagaagccgggtccggcggcgggcaacaccacggacctggtgaccgtcgtggcgtcgacgccggagggcgagtggctggacacggtggtggacccggacctgcggggcgaggaggaggaggacaagcaggagatggtgaagctgatcagggtcggcatggcgtgctgcgagaccaacgtggacagccggtgggagctcaggaccgccattgacaggatcgaggagctcaaggccaaggagcgccccgacgaggagcaggccttctacacgacggtgaacgaggaggaatacagcgacgttgccatcaactga

SEQ ID NO: 4936 - DNA, 1542 bp, Zea mays
atcccgtcacgttcggcgaaacccgggttataaaaccggagcacctcgccccccctctaccaccaccgcagccgcagcacaatcgcctcgccttcccttccccaccagcccgtctctctcttctctctgactctctctctcgtagccgcgtccacctcgcagcagcaagcaagcgcgaccaaatggcgcctctaggagacggcggagctgctgccgcggcggcgtccaacaacctggtggtgtcgttcggcgagatgctgatcgacttcgtccccgacgtggccgggctgtcgctggccgagtcgggcggcttcgtcaaggcacccggcggcgcgcccgccaacgtcgcctgcgccatcgccaagctcggcggatcctccgccttcgtaggcaagttcggcgacgacgagttcgggcacatgctggtgaacatcctgaagcagaacaacgtgaacgcggaggggtgcctgttcgacaagcacgcgcggacggcgctggccttcgtgacgctcaagcacgacggggagcgcgagttcatgttctacaggaacccgagcgcggacatgctgctgacggaggcggagctggacctgggcctggtgcggcgcgccagggtgttccactacggctccatctcgctcatctccgagccgtgccgctcggcgcacatggccgccatgcgcgcagccaaggccgcgggcgtgctctgctcctacgaccccaacgtgcgcctcccgctctggccgtcgcccgacgccgcacgcgagggcatcctcagcatctggaaggaggccgacttcatcaaggtcagcgacgacgaggtggccttcctcacgcgcggggacgccaacgacgagaagaacgtgctgtccctgtggtttgacgggctcaagctgctcgtcgtcaccgacggggacaagggatgcaggtacttcaccaaggacttcaagggcagcgtgcccggcttcaaggtcgacaccgtcgacaccaccggcgccggcgacgccttcgtcggctccctcctcgtcaacgtcgccaaggacgactccatcttccacaacgaggagaagctccgcgaggctctcaagttctccaamrcctgcggcgccatctgcaccaccaagaagggcgccatcccggcgctgcccacggtcgccaccgcccaggacctcatcgccaaggccaactagatggccgcacgccccgccgttccaccacgtcactgtcccccgccgccccgcccctcgtcgtcgacgtcctcggtttcggttcattaggtagatcgagtcttagcgtccgtctctgcgcctctacgctgagacggtttgtttgggttaattaagttagctttcgtggagatttcgccccggggcatcaataaaatgttggcatgcgtggtgggatgctatcctttttttttattttattttattttatttttagcttggatcagttggggttttgaacattgctagtgtcgtgtgattgggaaggctaatgtgatgccttcgatgcagagttttcataaaaaaaaaaaaaaaa

SEQ ID NO: 4937 - DNA, 1421 bp, Oryza sativa Japonica Group; identical to SEQ ID NO: 4908

SEQ ID NO: 4938 - DNA, 795 bp, Zea mays
aggtaaaccattcccctccgccccacctcttgtccagtgccccaaatgctggcgaccacctgcagccggccgccgtgcccgtgcccgtgcccgtgcgcgcggtcgcggcggctccccgcggcgaccttcggcggcaccagtagcgcgaagcgaagggcgccgaggagagcggcggcggcggtgcggtgcgggctgctgcccgtggacccgtgggcgccgacgatggactcccagagcgtggcgtcgcagctcttcgccgtctcgctcttcccctacctgggattcctctacttcatgaccaggtccaagaccgcgcccgggctcacgctcttcggtttctacttcctcctcgtcttcgtcggcgccaccatacctgctgggatttacgcaaaagttcattatggtacctcactgtccaacgttgactggctgcacgggggcgctgaatcgctgctgactctcaccaacctgtttatcgttttggggctgaggggagccctgaggaagctggaggaagagggcacagacgagagcgtttctgaagcttctcaagaaaaaagttctgtctagatgggttcatcatcagtacccctgaaggtgcactcagtaactaggagtgcgctgtttttcttcttctgcagctcaactagctcgtagtgatgttttgggtgtaaggaaatctggcagatctactctctgcatactatgctgataagaaaacaatgtacaggcatctcctgcaattctgagtagtaccttcagctgttgatagtagcagaaaaaaaaaaaaaaaaa

SEQ ID NO: 4939 - DNA, 752 bp, Zea mays
aaaaactcggtaaaccattcccctccccacctcttgtccagtgccccaaatgctggcgaccacctgcagccggccgccgtgcccgtgcgcgcggtcgcggcggctccccgcggcgaccttcagcgctaggcgcaccagtagcgcgaagcaaagggcgccgaggagagcggcggcgttgcggtgcgggctgctgcccgtggacccgtgggcgccgacgatggactcccagagcgtggcgtcgcagctcttcgccgtctcgctcttcccctacctgggattcctctacttcatgaccaggtccaagaccgcgcccgggctcacgctcttcggtttctacttcctcctcgtcttcgtcggcgccaccatacctgctgggatttacgcaaaagttcattatggtacctcactgtccaacgttgactggctgcacgggggcgctgaatcgctgctgactctcaccaacctgtttatcgttttggggctgaggggagccctgaggaagctggaggaagagggcacagacgagattgtttctgaagcttctcaagaaaaaagttctgtctagatgggttcatcatcagtacccctgaaggtgcactcagtaactaggagtgcgctgtttttcttcttctgcagctcaactagctcgtagtgatgttttgggtgtaaggaaatctggcagatctactctctgcatactatgctgataagaaaacaatgtacaggcatctcctgtaaaaaaaaaaaaaaaa

SEQ ID NO: 4940 - DNA, 755 bp, Zea mays
ctccgccccacctcttgtccagtgccccaaatgctggcgaccacctgcagccggccgccgtgcccgtgcccgtgcgcgcggtcgcggcggctccccgcggcgaccttcggcggcaccagtagcgcgaagcgaagggcgccgaggagagcggcggcggcggtgcggtgcgggctgctgcccgtggacccgtgggcgccgacgatggactcccagagcgtggcgtcgcagctcttcgccgtctcgctcttcccctacctgggattcctctacttcatgaccaggtccaagaccgcgcccgggctcacgctcttcggtttctacttcctcctcgtcttcgtcggcgccaccatacctgctgggatttacgcaaaagttcattatggtacctcactgtccaacgttgactggctgcacgggggcgctgaatcgctgctgactctcaccaacctgtttatcgttttggggctgaggggagccctgaggaagctggaggaagagggcacagacgagattgtttctgaagcttctcaagacagtgcagaaaaaagttctgtctagatgggttcatcatcagtacccctgaaggtgcacgagtgcgctgtttttcttcttctgcagctcaactagctcgtagtgatgttttgggtgtaaggaaatctggcagatctactctgtgcatattatgctgataagaaaacaatgtacaggcatctcctgcaattctgagtagtaacatattatgctgacgctggctt

SEQ ID NO: 4941 - DNA, 759 bp, Zea mays
aaaccattcccctccgccccacctcttgtccagtgccccaaatgctggcgaccacctgcagccggccgccgtgcccgtgcccgtgcccgtgcgcgcggtcgcggcggctccccgcggcgaccttcggcggcaccagtagcgcgaagcgaagggcgccgaggagagcggcggcggcggtgcggtgcgggctgctgcccgtggacccgtgggcgccgacgatggactcccagagcgtggcgtcgcagctcttcgccgtctcgctcttcccctacctgggattcctctacttcatgaccaggtccaagaccgcgcccgggctcacgctcttcggtttctacttcctcctcgtcttcgtcggcgccaccacaaaagttcattatggtacctcactgtccaacgttgactggctgcacgggggcgctgaatcgctgctgactctcaccaacctgtttatcgttttggggctgaggggagccctgaggaagctggaggaagagggcacagacgagagcgtttctgaagcttctcaagaaaaaagttctgtctagatgggttcatcatcagtacccctgaaggtgcactcagtaactaggagtgcgctgtttttcttcttctgcagctcaactagctcgtagtgatgttttgggtgtaaggaaatctggcagatctactctctgcatactatgctgataagaaacaatgtacaggcatctccctgcattctgagtagtaccttcagctgtcaaaaaaaaaaaaaaa

SEQ ID NO: 4942 - DNA, 822 bp, Zea mays
caaactcggtaaaccattcccctccccacctcttgtccagtgccccaaatgctggcgaccacctgcagccggccgccgtgcccgtgcgcgcggtcgcggcggctccccgcggcgaccttcagcgctaggcgcaccagtagcgcgaagcaaagggcgccgaggagagcggcggcgttgcggtgcgggctgctgcccgtggacccgtgggcgccgacgatggactcccagagcgtggcgtcgcagctcttcgccgtctcgctcttcccctacctgggattcctctacttcatgaccaggtccaagaccgcgcccgggctcacgctcttcggtttctacttcctcctcgtcttcgtcggcgccaccacaaaagttcattatggtacctcactgtccaacgttgactggctgcacgggggcgctgaatcgctgctgactctcaccaacctgtttatcgttttggggctgaggggagccctgaggaagctggaggaagagggcacagacgagattgtttctgaagcttctcaagaaaaaagttctgtctagatgggttcatcatcagtacccctgaaggtgcactcagtaactaggagtgcgctgtttttcttcttctgcagctcaactagctcgtagtgatgttttgggtgtaaggaaatctggcagatctactctctgcatactatgctgataagaaaacaatgtacaggcatctcctgcaattctgagtagtaccttcagctgttgatagtagcagtacactatagtctaggaagcttaattctattgctggctaaaaaaaaaaaaagaaaaaaaaaaaaaaaa

SEQ ID NO: 4943 - DNA, 525 bp, Sorghum bicolor
atgctggcgaccacctgcggcgcgccgccgtgcccgtgcgcacggtcgcggcggccccccacggcggcctttggcggaggctatggcattgggcgcacccgccgcagcactaggccaagggcgctgaggagagccggggtggtgcggtgcgggctgctgcccgtggacccgtgggcgccgacgatggactcccagagcgtggcgtcgcagctcttcgccgtctcgctcttcccctacctgggattcctctacttcatgaccaggtccaaaaccgcgcccgggctcacgctcttcggtttctacttcctcctcgtcttcgtcggcgccaccacaaaagttcattacggaacctcgctgtctaatgttgactggctgcacgggagcgcggaatcgctgcttactcttaccaatctatttatcgttttgggcctgaggggagccttgaggaagctggaggaagaagaggacacgaacgggagggtttctgaagcttctcaagacagtaaagaaaaaagttctgtctag

SEQ ID NO: 4944 - DNA, 677 bp, Oryza sativa Japonica Group
ggagaaattcgccacgcccaaatgctgccgaccacctgccgcgcgccgccgtgcccgtggccgcggccgctcgccgccggtagagccaggggaggctatggcctcggccgcgctcgcggggtgaagaggagagcggcggcggcgcgcgggatggtggtgcggtgcgggctgctccccgtggacccgtgggcgcccaccatggactcccagagcgtggcgtcgcagctgttcgccgtctcgctcttcccctacctcggcttcctctacttcatgaccaggtccaagacggcgccgggactcacgctcttcggattctacttcctcctcgccttcgtcggcgccaccacaaaagttcattatggaacctcgctgtctaacgtcgactggctgcacgggagtgcagaatcactacttactcttaccaatttattcatcgtgttggggttaaggggagccttgaggaaattggaggacacaaaagagagcgcttctgaagaatcccaggacattaaagaaaaaggttctatctagttactttgttttatatttttatcagcacagctgaagtcccatgtagtgatgtagaatgtatatttcttctgctaaaaatcttgtgtaagggtgcgctgtactgtaagaaattaagaaccctcgaagatttgctctgtgcatatgct

SEQ ID NO: 4945 - DNA, 726 bp, Hordeum vulgare subsp. vulgare
ggcccttcctgccgaaatgctggccgccaccgccgcctgccgcgcgccggcgcggccgctccccgccgcgcgacccggaagcagctacctcctcggtcgcgtccttctccccaagcggagagcgccggcggtgaggaggaggggacggagcgcggcggtgcggtgcgggctgctccccgtggacccgtgggctcccggcgtggactcccagagcatcgcgtcgcagctcttcgccgtgtcgctgttcccctacctggggttcctctacttcatgacccggtccaagacggcgcccgggctcacgctcttcggcttctacttcctcctcgccttcgtcggcgccaccatacctgctgggatatatgccaaagttcattacgggacctcgctgtcaaatgtggacctgctgcacgggacggcggaatccctcctcacactcaccaatctgttcatcgtgcttgggctgaggggagccctgaggaacttggataaagcagaggagagcagccctgaagctcctcgggacagcaaggagaagagttcagtataggtgcttgtaaattgttggaaaacctctgttttttagtgtgtgtagtgatgctgatgacattgtactgtagtgagtgtacatttcttctgctcaactagttgctgctgtaataagctgcacatgttggctttgtgcatttgctgatccgtaatatactggagctatggagctgctgc

SEQ ID NO: 4946 - DNA, 1078 bp, Zea mays; identical to SEQ ID NO: 1128

SEQ ID NO: 4947 - DNA, 1688 bp, Sorghum bicolor
atctagttagctcgggcctccattgcacggttgctcctgctcgctattcttagcccagagagcgcgccaccacaacacgtcccggccgcgcgcggcgtgcaacacacggctgccccggcccgcgcacccggccgtacgtgccgtgccgtgccggccagcagccatggacatcgacctcgaccgggcgcgtgcgctgcgcgtcgtcgggcgcggcgccatgggcaccgtgttcctcgtcgcggaggatgggccctcggccttgcgccccagccggtacgccctcaaggtcttcgacaagcgctccggcagcagcaagcccgacgccgaccgccgcgcgcggtgggagatcaacgtgctgtcccgcctcgcgcacccgcacctcccctccctcctcggcttcaccgagacggacgacctcctcgcctgggccgtcccgtactgctccggcggcgacctcaacgagctccgctactcgctccccgaccgcgtcttctcccccgccgccatccgcttctacattgccgagatcgtctccgcggtcgccgagctccacgccgccggcgtcgtgtaccgcgacctcaagcccgagaacgtgctcctccgcgccgacggacacgtcacgctcaccgacttcgacctgtcccgcctcctccaacccagcaggtccgcggactcgtcgtcgtcgccgccgccagcgtcgtcccgcggccaccaccacaaccaccgccggtcgcgcgtccccgcgcggagcgactcgatgctcggccaggccaagtcgtactccaagccccctcatcagccgtggtccgcgacggcgtcgccgcggcagcagctgcagagcctggtccggtacatcatggggagcggcggcgatggagccggggtgggaaggaagagcaagtcggcgcgggtgtcgcccgtgagccggaagcccgcgagcttcggtggctgcggctccggcgcgtccaccaccgccgccgggtggggcaagtcctactccttcgtgggcacggaggagtacgtggcgccggagatggtgcgcggcgagggccacggcttcgccgtcgactggtgggccgtcggcgtgctggtctacgagatggcgttcggcaaaacgccgttcaagggccagaaccgcaaggagacgttccggaacgtggtgcagagggaggtcgagttcccgggggacagcctgcgacggacgccggagctcgcggacctcatctcgggcctgctggagcgggacccgaggaggaggctcgggtacgccggcggcgctgacgagatccgtgcgcacccgttcttcgccggcgtggcgtgggacatgctcacggaggtgtcccggccgccctacatcccgccgccagccgacgaggacctcgcggaaggcgaggggttcgacgtgaggggccatttcaaggaccttcaccagccaccgccgacgaagtccgcgtcggagtcgtcctcctcgtcggagttctcgacggagttctaggcggtcggatcggactagctccttttgcgctttggtccttagtagattactgtattgtaaccgaaggatcgaggatgcctgtacatacatggaggcggggatggtgctgtaaattcgaggtagagttggtggggttgtgcaaacattttgggaagggcaacaatggctggctggctggcgcacgtgtatcgtg

SEQ ID NO: 4948 - DNA, 1630 bp, Zea mays
aagtgcgctccattgcgtggttgctcctgctctcgcctctcgctattcttagccccagagctcgcgccacgccacaacacgtacctcccgcgcgcggggcgtgcaagcacacggctgccccggcccgcgcgcccgtgccggccggccagcagacatggacatcgacctcgaccgggcgcgcgcgctgcgcatcctcggccgcggcgccatgggcaccgtgttcctcgtcgcggaggggccctcggccttgcgccccagccgctacgccctcaaggtcttcgacaagcgctccgccgcccgcagcaggaagcctgacgccgaccgccgcgcgcggtgggagatcagcgtgctgtcccgccttgcgcacccgcacctcccctcgctcctcggcttcaccgagacggacgaccttctcgcgtgggccgtcccctactgctccggcggcgacctcaacgagctccgctactcgctccccgaccgcatcttctcccccgcggccatccgcttctacattgccgagatcgtctccgcggtcgccgagctccacgccgcgggcgtcgtgtaccgtgacctcaagcccgagaacgtgctcctccgcgccgacggccacgtcacgctcaccgacttcgacctgtcccgcctcctccaccccagcaggtcgtccgcggagtcgtcgtcgcccccgcggccagcgtcgtcccgcggccaccacaaccgccggtcgcgcgtccccgcgcggagcgactcggttctcagccagcaggtcaagtcgtactccaactccaacaactccaggccccctcaccagccctggtccgcggcgtcgtcgccgcggcagcagctccagagcctggtccgctacatcatggggagcggcgacggggccggggtgggcaggaagagcaagtcggcgcgggtgtcgccgctgagccggaagcccgcgagcttcggcggcagctcctccgccgccgcgtggggcaagtcctactccttcgtcggcacggaggagtacgtggcgccagagatggtgcgcggcgagggccacggcttcgccgtcgactggtgggccgtcggcgtgctcgcctacgagatggcgttcgggcggacgccgttcaagggccagaaccgcaaggagacgttccggaacgtgctgcagcaggagctcgagttcccgggggacacccggtggcggacgccggagctcgcggatctcatctcgggcctgctggagcgggacccgaggaggaggctcgggtacgccggcggcgccgacgaggtccgggcccacccgttcttcgccggcgtcgcgtgggacatgctcacggaggtgtccaggccgccttacatcccgccgccggccgacgaggacctcgcggacgtcgaagggttcgacgtgaggggccacttcaaggaccttcaccagccgccgcctcccaagtccgcgtcggagtcgtcctcgtccgagttctcgacggagttctgactgtgagctcgggctagcttcttttgcgctttggtcctcggtagattactatattgtaaccagagggtcgagggtgtctgtactgtacatacatggagacggggatggtgctgtaaaaaaaaaaaaaaagaaaaaaaaaaaaaaaaa

SEQ ID NO: 4949 - DNA, 1508 bp, Zea mays; identical to SEQ ID NO: 1129

SEQ ID NO: 4950 - DNA, 1673 bp, Zea mays
cgccacgacacggcccgcgcgatcacgcacgctcatgccactggcgccactcatggagatcgacctgcacgccgtgcgcgcggtgcgcgtgctgggccgcggcgccatgggcacggtcttcctcgccgtgaacggcgccggcggggaggcctacgcgctcaaggtcttcgacaagcgctcccccgcggtagcgtccaggccgtccgcgggcaccgacgcggcgcggcgcgcgcggtgggaggtgtccgtgctgtccaggctcgcgcacccgcacctgccgtccctgctcggctgcgccgagacgcccgacctgctggcgtgggcactgccctactgccccggcggggacctgaacgagctccgccacgcgcagcccgaccgcgtgttctcccccgcggccatccggttctacgtcgccgaggtggtgtccgcgctcgccgagctccacgccgccgggatcgcgtaccgcgacctcaagcccgagaacgtgctcctccgcgccgacggccacgtcacgctgaccgacttcgacctctcgcggcagctcccgcccaggtccccctccgccgcatccacgtccacctcctcgtcgtgctcggcgacatcgtctccgccgccacaggcccagagccacggccggagccagcaccgccacgtgaagaacatcttcaagagaagcgagtccgcggtgaccgcgtcaacctccggacaggaggaaccgcgcaacctcgcctggtacctgagcaaaagaatcgacggcggcgccgaccagatcaagaaggcgaagtcggccagggtgtcgccgatggaccgcggcaagaagctctcgagcttctgctccgccgcagcagcgggggagcggtcgttctcgttcgtgggcaccgaggagtacgttgcgccggaggtggtgcgcggcgacgggcacgagttcgcggtcgactggtgggcgctcggggtgctcgtctacgagatgtcccacgggcggacgccgttccggggccggggccggaaggagacgttccggaacgtgctgctccgggagccggagttcacggcggacgcgcggcggcggtggccggagctgacggacctcatcgcgaggctgctggagaaggaccctgcgcggaggctgggtttcgccggcggcgccgacgaggtccgggcgcacccgttcttcgccggggtggcgtgggacctgctcggggaggtgtcccggccgccctacattcccgcgccggccgatgacactgtctcctgcgagggattcagcgtggtggagtacttcgataggcttcaccagcctccgctgtcgccagcggagtactcgcccgaggaagagctcttgccggagttctgacactggttgtgccgtcgccggcggagcactcgcccgaggaagagctcttgccggagttctgacgtcggttgttccgttgttgtcgctcgagatttgtgctccctgttgttttcgttctgcgccctctaagatcgatcactatgtgtgaacagagaggggcttttgttagttaaccaagatacagtcgatgattcgacactcgacagatgagacttgtggtttcaagtctctcgtcagtttttactgtatactgtaaccgtaactgaactactgaaggtgtcaggcactgatgcacgaatatgaattccttgtgcat

SEQ ID NO: 4951 - DNA, 1299 bp, Sorghum bicolor
atggagatcgacctgcacgacgtgcgcgcggcgcgcgtgctgggccgcggcgccatgggcacggtcttcctcgccgtggacggcgccgccagcagcggggaggcctacgcgctcaaggtcttcgacaagcgctcccctgcggcgtcgaggccggccgcgggcgccgacgcggcgcggcgcgcgcggtgggaggtgtccgtgctgtccaggctcgcgcacccgcaccttccgtccctgctcggctgcgccgagacgcccgacctgctggcgtgggcgctgccctactgccccggcggggacctcaacgagctccgccacgcgcagcccgaccgcgtgttctcgcccgcggccatccggttctacgtcgccgaggtggtgtccgcgctcgccgagctccacgccaccgggatcgcgtaccgcgacctcaagcccgagaacgtgctcctccgcgccgacggccacgtcatgctgaccgactttgacctctcgcggcagctccctccgaggtcccccgccgcgtccacgtccacgtcgacctcgtcgtcgtgctcggcgacatcgtccccgccgccgcctcaggcccagagccacagacggttgaagaacatcttcaagaggagcgagtccgcggtgaccgcgtctacttccggacaggaggaggaaccgcgcaacctcgcctggtacctggacagaagcatcgaaggcggcgtcgaccagatcaagaaggcgaaatcggccagggtatcgccgatggaacgcgccaagaagctctcgagcttcttgtccgccgcagcgggagagcggtcgttctcgttcgtgggcacggaggagtacgtggcgccggaggtggtgcgcggcgacgggcacgagttcgcggtcgactggtgggcgctcggggtgctcgtctacgagatgtgccacgggcggacgccgttccggggccggaaccggaaggagacgttccggaacgtgctgctccgggagccggagttcacggcggacgcgcggcggcggtggccggagctcacggacctcatcgcgaggctgctggagaaggatccttcgcggaggctgggcttcgccggcggcgccgacgaggtccgggcgcacccgttcttcgccggggtggcgtgggacctgctaggggaggtgtcccggccgccctacatccccgcgccggccgatgacattgtctcctgcgacgggttcagcgtggtggagtacttcgataagcttcaccagcctccgctgtcgccggcggagcactcgcccgaggacgacctcttgccggagttctga

SEQ ID NO: 4952 - DNA, 1554 bp, Hordeum vulgare subsp. vulgare
ggcagcccgacagtcacgaggccacagctccgcgcatcgacacgacgccgcgcgaggcttggctttggcgcgcgctctcgggcgatcatgcagcccgtgtccggcacgggcgtgatggacatagacctcccatcggcgcgggcggcgcgggtgctgggccgcggcgccatgggcaccgtgttcctggtcgccgccgacgccgagtacgcgctcaaggtcttcgacaggcgctcccacgcgcccgggcgcgcggaggacgccgcgcggcgcgcgcggtgggaggtgtccgtgctgtcccggctcgcgcacccgcacctgccgtccctgctgggccgcgccgagacgcccgacctgctcgcgtgggccatgccctactgcgctgggggcgacctcaacgagctccgccgagcgcagcccgaccgcgtcttctcccccgccgccgtcaggttctacgccgccgagctcgtctccgcgctcgccgacctccacgccgccgggatcgcctaccgcgacctcaagcccgagaacgtcctcctccgcgccgacggccacgtcacgctcaccgactttgacctctcccggctgctcccgcccaagtccccttccgcctccacgtgcacgtccgcctcctcgccgtgctcgtccgctacgccgtcgccgacggcgccgaagccaaagccccacggccgacagtaccgccacctccgccgaatcttcgcgagaagcgagtcctcggtggccgcgtcgtccggacatgagccccagcacaacctggcatggtaccttaacaggagcgacggcggcgtcgacaagctcaagaaggccaggtccgccagggcgtccgcgtcgtcgggccgcggcaagaaccacgcgagcttccgctcggcggcgagcggcggcgtcgcgtgcgagaggtccttctcgttcgtcggcacggaggagtacgtggcgccggaggtggtgaggggcgacggccacgagttctccgtcgactggtgggcgctcggggtgctcgtgtacgagatggcgttcgggaggacgccgttccgcggccggaaccggaaggagacgttccggaacgtgctgctccgggagcccgagttctcggccgacgtcgggcggcggtggccggacctcaccgacgtcatctcgcgcctgctggacaaggaccccgcgagaaggctgggcttttcaggcggcgccgacgaggtcagggcgcacccgttcttcgccggcgtggcgtgggacttgctcggggaggtgtcccggccgccgtacataccgccgccggctgatgacactgtggcgtgcgaggggttcggcgtggtagattacttgcagaagcttcaccagcctccaccgcaggcagatggatcgccagagtccttgccagagttctgacgttcgttattttcacctgctgtatgtcagttttaccgttttgcaccttggagaatcactatatcctgcgactagggtttagttgtattgtatcgtcgtatgtgtaaatacgacacgaagattatgctagagtaatgactcgttcggtaatcc

SEQ ID NO: 4953 - DNA, 1743 bp, Zea mays
cgcggccaccgcttcctccatgtccgcgcccgtgggccggcttctactgctggtctccgctgtcgcggtaggcctggcgctccccgtggcggccgagatcaagaaggagtccttcagggaggacccgcgctcgtccatcatgttcgagaaattcggcttctccaggtccggcgaggtccggatcatcatctcgggcgcctccgtctcctcccccgtcgcgcgggccgacctcaagcagctcgggttcttcctcgtctccgacgagtccctcctcgacgccatcgacgaggcgcgggaggaggggccgacgccggagaagctcgtcgcggcgagcgacgacgaccccgacgacggtgccgctgccgggtgcgtgctcgacagccccagcccctacgtgaggaagctcttcaccttcaagaacatgaagggcgggcactacaacaggtccttcccggtgacccgccccgacgagtacgcgctcttcttcgccaactgcgccccggggtcgctcgtctccatgaccgtccgcaccgagatgtacaacgtcggcgccgacggctccaaggactacctccccgtcgggcaggcgccgctgcccgccatccacggcgtcttcgcgctctgctacgccgcgttcctggccgcctgggggtacctgaccctctcatccgtctccgcgcagcagatccaccacctcatgtccggcctcctcgccgcgcgcctgctctactgcgtctcggccgccgaggaccagcaccacgtccgcgccacggggacgccgcacggctgggaccacgtggccttgtacctgttccagctcgtgaagggcgtggtcctcttcgcgctggtcggcacgggctggtgcttcctgaagccggtcctgcaggggcgggagaagaaggtgctcgtggccgtgatcccgctccaggtggccgcgaacgtcgccgccgcggtggtcggggaggccgggccctccctgctgctgcaggggtgggcgacgtggtggaaccggaccctgctcctcgtggacgtcgcgtgctgctgcgcggtgctcttcccggtcgtgtggtcgcactcgcaccgggagacgtcgtccaagaccgacggcaaggcggcgcgcaacctctccaggctcaccctgttccagcggttctacgccgcggtgatcgggtacctgtacttcactagggtcgtcgtgtacgcgctcaggacggctgccagctacaggtaccggtgggcgagcgtcttggcggaggagacggccgccctggcgttctacctgttcatgttccacacgttcaggccggccgagaagagccactacttctgtctccatgacgacgacgacgacgacgagatggtgctccgagaagaggaactcgagctatgaacagatagatgcagcaatcagcagcagccccatgtctcgtttgaaccatgctgtatattctgcgtgtggtaatccgtcctcgtcatttcgttcggcacattttgactttgttgtgccaggaatcaacgtgacgctctgcggttttctacgtactgacgaccagcatgtgtagaaagaaagtggcacgcgccgttccttttccctgccccaccttgtcctatgtgtcttctgaaattccctgcgacgctttgctgcgtctgcgttattattgtctcacggtacgttgtggtcacacacacatgtacacacgctcgcgtgattaaagaaggcacaaagcatcgctagatttattt

SEQ ID NO: 4954 - DNA, 1520 bp, Zea mays
accgatttgatttctccctcatcctccgcccgcctcgccgcggccaccgcttcctccatgtccgcgcccgtgggccggcttctactgctggtctccgctgtcgcggtagggcctggcgctccccgtggcggcmgagatcaaraaggagtccttcagggaggacccgcgctcgtccatcatgttcgagaaattcggcttctccaggtccggcgaggtccggatcaccgtgtcgggcgcctcagtatcctcccccgtcgcgcgggccgacctcaagcagctcgggttcttcctcctctccgacgagtccctcctccacgccatcgacraggcgcgggaggaggggccgacgccgragaagctcgtcgcggcragcgacgacgaccccgacgatgccgggtgcgtgctcgacagccccagcccctacgtgaggaagctcttcaccttcaagaacatgaagggcggccactacaacaggtccttcccggtgacccgccccgacgagtacgcgctcttcttcgccaactgcgccccggggtcgctcgtctccatgaccgtccgcaccgagatgtacaacgtcggcgccgacggctccaaggactacctccccgtcgggcaggcgccgctgcccgccatccacggcgtcttcgcgctctgctacgccgcgttcctggccgcctgggggtacctgaccctctcatccgtctccgcgcagcagatccaccacctcatgtccggcctcctcgcggcgcgcctgctctactgcgtctcggccgccgaggaccagcaccacgtccgcgccacggggacgccgcacggctgggaccacgtggccttgtacctgttccagctcgtgaagggcgtggtcctcttcgcgctggtcggcacgggctggtccttcctgaagccggtcctgcaggggcgggagaagaaggtgctcgtggccgtgatcccgctccaggtggccgcgaacgtggtcggggaggccgggccctccctgctgcaggggtactgggcgacgtggtggaaccggaccctgctcctcgtggacgtcgcgtgctgctgcgcggtgctcttcccggtcgtgtggtcgcactcgcaccgggagacgtcgtccaagaccgacggcaaggcggcgcgcaacctctccaggctcaccctgttccggcggttctacgccgcggtgatcgggtacctgtacttcgctagggtcgtcgtgtacgcgctcaggacggctgccagctacaggtaccggtgggcgagcgtcttggcggaggagacggccgccctggcgttctacctgttcatgttccacacgtgcaggccggccgagaagagccactacttctgtctccatgacgacgacgacgacgacgagatggtgctccgagaagaggaactcgagctatgaacagatagatgcagcaatcagcagcagccccatgtctcgtttgaaccatgctgtatattctgcgtgtggtaatccgtcctcgtcatttcgttcggcaaaaaaaaaaaaaaaa

SEQ ID NO: 4955 - DNA, 1719 bp, Zea mays
cgacacacttcccactcatctcgtcctcatcctccgctccccacccacccccacccccacccccaccccacagatctcgccgcggccaccgcttcctctatggccgcgccagcccgccgccttctcctgctcgtcgtcaccgtagctggagccctggcgctccccgtggcggcccagatcaaggaggagtccttcaaggaggacccgcgctcgtccatcatgttcgaaaaattcggcttctccgagtccggcgcggtgcggatcatcgtctcgggcgcctccgtctcctcccccgtcgcgcgggcggaccccaggcagctcgggttcttcctcctctccgacgagtccctcctccacgccatcgacgaggcgcaggaggggcccacgcgggagaagcgcgccgcggcgaccaatggcggcggggaggaccccgacggcggctccaccgggtgcgtgctcaacagcccctacgtcaagaagctcttcaccttcaagaacatgaagggcggccactacaacatgtccttcccggtcacccgccccgacgagtacaccctcttcttcgccaactgcgccccggaggcgctcgtctccatggccgtccgcaccgagatgtacaacgtcaacgccgacggctccaaggactacctccccgtcggccaggcgcccctgcccgccatctacggtttcttcgccttctgctacgccgcgttcctggccgcctgggggtacctcaccctctcccgcgcccgcgtctccgcgcaccagatccaccacctcatgtccggcctcctcgtcgcgcgcctgctctactgcctctccgcggccgaggaccagcactacatccgcgtcacggggacgccgcacggctgggatgtggccttctacctcttccagctcgtgaaaggtgtcatcctcttcgcggtgatcgcgctggtcggcacggggtggtcattcttgaagccggtgctgcaggaccgggagaagaaggtgctcatggccgtgatcccgctccaggtcaccgcgaacatcgccgccgcggtcattggggagaccgggcccttcatgcaggggtgggtgacatggaaccagatcttgctcttcgtggatgtcgtgtgctgctgcgcggtgctcttcccggtcgtgtggtctatccggtcgctcagggagacgtccaagaccgacggcaaggcggcacggaacctctccaagctcaccctgttcaggcagttctacgtcgtggtgatcgggtacctgtacttcactaggatcgtcgtgtatgcgctcaaggcagttgccagctacaagtaccggtgggtgagcatcttggcagaagagatggccaccctggcgttctatctgttcatgttctacacgttcaggccggccgagaagagccactacttttctctcgatgacgatgaagaagaggccgcagagatggtgctccgagaagaggaattcgagctatgaaagagatgcagcgactcacaagagtctccatgccacgtcactccctgtgatcttgatcatacctcaaatgcccggacacagctcatagtgttgtatgtaccgaagggatgtgagatcattttgtccgtcttctagaattcagattttagtattttactgatgaaacacagattacttaacttataccatgttcaagaagttttcttgcttgcaatgcaatcagagcagcaactcctgctttggctt

SEQ ID NO: 4956 - DNA, 1736 bp, Sorghum bicolor
accgacacactcccactcatttcgtcctcatcctccgccccgcgccgccgcccccacagatctcgccgcggccaccgcttcctccatggccgcgccggcgggccgccttcttctgctcgtcttcgccgtcgcgggagccctggcgccccccgtggcggccgagatcaggaaggagtccttcagggaggacccgcgctcgtccatcatgttcgagaaattcggcttctccaagtctggccgggtccggatcatcgtctctggcgccgccgtctcctcccccgtcgcgcggccggacaacgcggagctcgggttcttcctcctctccgacgagtccctcctccacgccatcgacgaggcgcaggaggggcccacgcgggagaagcgcgccgcggcgaccaacggcggcggcgaggaccccgatgggagctccggcgccggcgccgggtgcgtgctcgacagcccctacgtgaagaagctcttcaccttcaaaaacatgaagggcggccactacaacaagtccttcccggtcacccgccccgacgagtacaccctcttcttcgccaactgcgccccggaggcgctcgtctccatgaccgtccgcaccgagatgtacaacgtcaacgccgacggctccaaggactacctccccgtcggccaggcgcccctgccggccatctacggcttcttcgccttctgctacgccgcgttcctggccgcctgggggtacctcaccctctcccgcgaccgcgtgtccgcgcaccagatccaccacctcatgtcgggcctcctcgtcgcgcgcctgctcttctgcctctccgccgccgaggaccagcactacatccgcgtcacggggacgccgcacggatgggatgtggccttctacctcttccagctcgtgaagggtgtcatcctcttcgcggtgatcgcgctggtcggcacggggtggtccttcttgaagccggtcctgcaggaccgggagaagaaggtgctcatggccgtgatcccgctccaggtcaccgccaacatcgccgccgctgtcattggggagacagggcccttcatggagagctgggtgacatggaatcagatcttgctcttcgtggatgtggcgtgctgttgcgcggtgctcttcccggtcgtctggtccatccggtcgctcagggagacgtccaagaccgacggcaaggcggcgcggaacctctccaagctcacactgttccggcagttctacgtcgtggtgattgggtacctctacttcactaggatcgtcgtgtatgcgctcaagacggttgccagctacaagtaccggtgggtgagcgttttggcagaggagatggccaccctggcgttctacctgttcatgttctacacattcaggccggccgagaagagccactacttctctctcgatgaagatgaagaagaggccgcagagatggtgctccgagaagaggaattcgagctatgaggagatgcagcgagtgattcatacgagagtctccatgccacgttcgtttgatcttcactccctgtgatcttgatcatacttcaaatgcccggccggacacggctttgtatgtaccgatgggatgtgagatcgttttgttcttcttgtagatttcagatttttactagtattttactgatgaaacacagattacttaacttataccaccatgttcaagaagttttcttgcttgcaatgcaatcagcagcaactactcctgtttcggcac

SEQ ID NO: 4957 - DNA, 1228 bp, Zea mays
atcctctccctcgccagcagccgcctcgccacagaactaaaacctcgatcgatctcagttcaatccatggaggacgtggccaacgcacacatctacgcccacgcccaccggagcaagcgtccccagtcggccgcgatcaaagacggggacggggacgtcgacctgtccatgaaaggcgcgcggtaccgcggcgtgcggcgccggccgtggggccggttcgcggcagagatccgcgaccccatgtccaaggagcggcgatggctcggcaccttcgacaccgccgagcaggccgcctgcgcctacgacatcgcggcgcgcgccatgcgcggcaacaaggcgcgcaccaacttcccgggccacgccacggcgggctactggccgtggggcgcgccgcagccggcggcggtggcgcacccgatcaaccctttcctcctgcacaacctcatcatgagctcctccaaccacggctgccgcctgctcaaccacgcaggccacggacacgtccactccgcagcccccagacctccggcgccggcggcggacgccacgtccacgaccatcgcagcgcccttccctgtcgccgcacaccccgccgtagcgatggacgaggacgtggacgactgggacggcgtcctgcggagcgagcccgcggacgccgggctgctgcaggacgcgctgcacgacttctaccctttcacgcgtccgcgcgccggcgggggcaggcgcggcctgtccgcggccggaaccgacgccagggcggcagctgcgttggtggcgccggtaaagccggatgctttcgtcgttcccagccctttcgccggcgtcgagggggacggcgaatacccgatgatgccgcagggcctgctcgaggacgtgatccactccccggcgttcgtggaggttgtggccgcgccgccgtccgtccccacgcgccgcggccgccggggctgatgggtgcgtggatcgcgtgcgagtgggacatgaaatggaggaccttgtgcttttgggattcacgattgcttgcttgatttcatgacagccaaatcgatcatctagtcgccttgtgtgttttactagcagctagctagcatgtagtactgatgatatgcgtggtgtcctggactgtgtactccaatgcatggaatcaaagcttgttttcgatggattccaaccagtttcatcttgctctttagtattttgattacttgcgaaaaaaaaaaaaaaaaaa

SEQ ID NO: 4958 - DNA, 1297 bp, Sorghum bicolor
catcctcactcgccagcagccgcctcgccacagaaccccacctcgatcgatctccgttcgcctgcggagcgcgccgctcaaggctcaagccatggaggacgtggccaacgcgcacctctacgcccatgcccacgcccaccggagcaagcgtcccccgtcgtcggccgcgatgaaggacggggacggggacgtcgacttgtccatgaagggcgcgcggtaccgcggcgtgcggcgccggccgtggggccggttcgcggcggagatccgcgaccccatgtccaaggagcggcggtggctcggcaccttcgacaccgctgagcaggccgcctgcgcctacgacatcgccgcgcgcgccatgcgcggcaacaaggcgcgcaccaacttccccggccacgccaccgcgggctactggccgtggggcacgccgcagccggcggcggtcgcggtcgcgcacccgatcaacatcaaccccctcctgctgcacaacctcatcatgagctcctcccaccacggctgccgcctgcttaaccaagcaggacacggacacgggcacggacacggacattccgttcccaccagacctccggcgccggcgccggcgacggatgacacgaccatcgcagggcccttccctgtcgcctcccaccccgacgtcgtagcgatggacgaggacgtggacgactgggacggcgtcctgcggagcgagcccgcggacgccggtctgctgcaggacgcgctgcacgacttctacccttttacgcgtccgcgcgccggcggcgatggcaggcgcggcctgtccgcggccggcgccgacgacgccagggcagccgcagctgcgttggtgccggtaatgcaggaggggttcgtctttcccagccctttcgcgggcgtcgacgggaacggcgagtacccgatgatgccgcagggcctgctcgaggacgtgatcccacactccccggcgttcctggaggtcgtggccgcgccgtccgtctccgtcccgacgcgacgcggccgcaggggctgatggctccggcgcccgcgctgtgcgtgcgcgcgtgcatggatcgcgtgcgcgcggggcatgaaatggaggatctggttcttttgggattcacgattccttgctcttgattgcatgactgccaaatcaatcatctagtcgtcttgggctttactagtagttagtgtagccagcaagtagtagatcgatgtgatgatatgcggggtgtcctggtggtgtgctctgtagttgtttaactggagtggcaatgcatggaatcaaagtttgttttcggtg

SEQ ID NO: 4959 - DNA, 1161 bp, Sorghum bicolor
atgggcgacgtcgtgcgcggcctgcacggcggcggcggcgccggcgttccggcgccggccaagtcgccggagcgcgcgcggctgcacgtggcgatgctggcgctgcagttcgggtacgccggcttccacgtggtgtcccggctggcgctcaacatgggcgtcagcaagctcgtcttccccgtctaccgcaacctcatcgcgctctgcctcctcgccccgttcgcctacttcctcgagaagaaggacaggcccgccatgactcccgccttcctgctccagttcttcctcctcgcgctgtgcgggatcaccgccaaccagggcttctacctgctggggctcgacaacacgtcgcccacgttcgcgtcggcgatccagaactcggtcccggccatcaccttcgccatggccgccgcgctgggtatcgagcgtgtccgcctccgacgccgggatggactcgctaaggtggcgggcacgatgctctgcgtcgccggcgccaccgtcatcacgctcttcaagggccccgccgtcttcggcccggccacggcggccgtggtgaccaccgtgaccgccgcgggcaccaccggcggcaacaagagctgggcgctggggtgcgtctacctcatgggccactgcttgtcgtggtccggctggctggtgctgcaggcgcccgtgctcaagcgctacccagcgcgcctgtccgtcacctcctacacctgcttcttcggcctcctccagttcctcgccgtcgccgccgtcgtcgagcgcgacgccgccgcctggacgcttacctccggctccgagctcctcaccatcctctacgcggggctggtggcgtccggcgtggcgttcgcggtgcagacgtggtgcatcgaccgcggcggaccggtgttcgtggccgtgtaccagcccgtgcagacgctcctcgtcgccgtcatggcgtcgctgctcctcggcgagcaattctacctcggaggggtcatgggggcagtgctcatcatcgctgggctctacctggtgctgtggggcaagagcgaggagagggcgctcgctgcaaagctcgccgccgccggcgtcggtgacgacgagcccgacgcggccgccgcctcctgcctgaagcagccgctgctaccgtcgccggcgaccttggagtcagctgtgtga

SEQ ID NO: 4960 - DNA, 1757 bp, Zea mays
ccatcttggcttgccgcttgcagcaagcacctgcacacttgacacagtcctgtgtgtccatcgctacttgcagcagcagctgcaggtgtagtggacctaggtagctagctgtgtatagcacgtggccacgttcgtgaccctgcactgcagctgcagcagcaggtaacgggtgatcctatcatgggcgacgacgtgcgtggcctgcgcgccgccgccgtgacgaccgccgccggcgtcgtgccggcgaagacgccggagcgcgcgcggctgcacgtggcgatgctggcgctgcagttcgggtacgccggcttccacgtggtgtcccggctggcgctcaacatgggcgtcagcaagctcgtcttccccgtctaccgcaacctcatcgcgctctgcctcctcgcgcccttcgcctacttcctagagaagaaggacaggcccgccatgacgcccgccttcctgctccagttcttcctgctggcgctgtgcgggatcaccgcgaaccagggcttctacctgctgggcctggacaacacgtcgccgacgttcgcgtcggcgatccagaactcggtcccggccatcaccttcgcgatggcggcggcgctgggcatcgagcgggtccgcctccgccgccgggacggcctcgccaaggcggccggcaccgtgctctgcgtcgcgggcgccaccgtcatcacgctcttcaagggccccgccgtcttcggcccggcgccctccgtggccgcagccgtgcccgtgcccatgcccgcgccgggcggcggcaacaacaacaacaacaacaagagctgggcgctggggtgcgtctacctcatgggccactgcctgtcgtggtccggctggctcgtgctgcaggcgcccgtgctcaagcgctacccggcgcgcctgtccgtcacctcctacacctgcttcttcggcctcctccagttcctcgccgtcgccgccgtcttcgagcgcgacgccgccgcctgggcgctcggctccggctccgagctcctcaccatcctctacgcggggctggtggcgtccggcgtggcgttcgcggtgcagacgtggtgcatcgaccgcggcggcccggtgttcgtggctgtctaccagcccgtgcagacgctcctcgtcgccgtcatggcgtcgctgctcctcggcgagcaattctacctcggcgggatcatgggggcagtgttcatcatcgctggactctacctggtgctgtggggcaagagccaggagagggcgctcgctgcaaagcaaaccgccgccgccgccgccggaagcgtctgcgacgacgacgcggctgcctcctgcctgaagcagccgctgctaccgccgccgccggcgacctcggaggccgtgtgatctccaatcggacccgaccgatcattttcatacggcggaggagtgtatgcatgcatctgtcatcgcgcctcatcatcagcatgcatgttaggttaatccatccatccatcacctatcacatggctagatctgagtaccaatacaagcagttgcgtggcgagtaacatgtacaacgattgcaacctttcgtcagcgaactgcagctgctcccgtttttatatgatattgcaactggacctatatattttaattttgtttagcttaagtgggacagcagttgaccgagcatgagtggcaactgccatgaatgtcgtcgatcattaggtacaatccatgtgatcggtgctttagagatcgagttattaattctcacaaaaaaaacttatgat

SEQ ID NO: 4961 - DNA, 1621 bp, Sorghum bicolor
ttggtgctcgatcttgcctgaatatagttcatttcctctgtctgactcttctttgttaatcggccttgctagctagctatctatctagctatctatctagctcggccaagtaataaccgccaaccgggcgtcgtcgcgcgaagtagagcgcacgcagcaacaatggcggacgccggggaggggcggcgggtgtgcggcatgccggagaaggcgcagctgcacgtggcgatgctggcgctgcagttcggctacgcggggttccacgtggtgtcgcggctggcgctcaacatgggcatcagcaagctcgtcttccccgtctaccgcaacatcatcgcgctctgcctcctcgtccccttcgcctactttctcgagaagaaggacaggccgcagctgaccctcaacttcgtcatccagttcttcctcctcgcgctctgcggcatcacggcgaaccaagggttctacctgctggggctggacaacacgtcgccgacgttcgcgtcggcgatccagaactcggtgccggcaatcaccttcgccatggcggcggcgctgcggatcgagaaggtccggctggaccggcgcgacggcgtggccaaggtggccgggacgctggcgtgcgtggcgggtgcgtccgtcatcacgctctacaagggccccaccatcttcggccccagcggcggcggcggcggcggcgacaagctccagctgcagcaggtggccgtggccgtggccgccggcgagaagaactggacgctgggttgcgtgtacctgatcgggcactgcctgtcgtggtccggctggctggtgctccaggcccccgtgctgaagaagtacccggcgcggctctccgtcacctcctacacctgcttcttcggcgtcatccagttcctcgtcatcgccgccttcatggagagggacgccgacgcctggaaattccactccggatccgagctcttcacaatcctatacgccgggttcatcgcgtcgggggtggcgttcgcggtgcagatctggtgcatcgaccgcggtggtccggtgttcgtggcggtgtaccagccggtgcagacgctggtggtggcaatcatggcgtcgctcaccctgggcgagaagttctacctgggcggcatcatcggcgccgtgctcatcatcgccggcctctacctcgtgctctggggcaagagcgaggagagggcgcgcatcgccagggacgccgccgccgccctcgtcgtctccggcgccggcgaccgcgaggggctccttgcggccggcggcggcggtggtggtggcatccggagcaaggcggcggcgtcggcggccgtcacgcagcctctgctgctgccgtcctccacctccaccgacaacgtctgacctatcgagatggatgaatcctaaatttgtggtgcagcatggagagatcagaggctgcatgcgtacgattcatgaggctgccatgctgcggctctgcacgaactcatcatggattggagcagccataagatccgatccagtattattgtcagttagtcttcttttgaggttttccttgttgatttcaggcatgtatgtatgtatgtatgctgctacctacgtatatgcattagtactattgtgtgtgtgtgtg

SEQ ID NO: 4962 - DNA, 2395 bp, Oryza sativa Japonica Group
gcggcggaggcggatgcacggaaggtgtgcgggttgccggagcgggtgcagctccatggggcgatgctggcgctgcagttcggctacgcggggttccatgtggtgtctcggtttgccctcaacatgggcatcagcaagctcgtcttccccgtctaccgcaacatcatcgccctcatcctcctcgtccccttcgcctatttcctcgagaagtatatactgtctgctgtttaatttctgaattgaacctccgtcctcctagagtttcagtcagttgtaatctcgatcgatcgatcgatctgtagtgtaggtagctaacaattaattaatgtagacgaacgtggatgatggatgcaggaaggatcggccgcagctgacgctgagcttcgtggtgcagttcttcctgctggcgctgtgcggcatcaccgccaaccagggcttctacctcctcggactcgacaacacctccccgaccttcgcctccgccatccagaactccgtcccggccatcaccttcgccatggccgccgcgctccgcatcgagcgcgtccgcctcgaccgccgcgacggcgtcgccaaggtgctcggcacgctggcctgcgtcgccggcgcctccgtcatcacgctctacaagggccctaccatcttcggtcccaagctgcagctgcaggcggtggcggaggtgccgttgagggcggcgatcgccggagaggggaagaactggacgctgggctgcgtgtacttgatcgggcactgcctgtcgtggtcgggatggctggtgctgcaggcgccggtgctgaagaagtacccggcgaggctgtcggtgacgtcatacacctgcttcttcggcgtcatccagttcctcatcatcgccgccttcatggagagggacgccgacgcctgggccttccactccggctccgagctcttcaccatcctttacgccgtacgtatctatctccattctccctacgtatacgatctccatctattcacctacgtatacgatccatatgcatgcattactgctggtctttcgattattcctacctccaaatatcaacatgcaaattaattaattaattatttactgatcagctcatcttatgccaacctaattaagctagctagtagtggacaggactatacatacgtgcaacgattaatttattaagctaatctacagcctactttgtgttaattatatctgcaccagctcatggtcactttaatttattgacaatcattctgtatactgtactggattgaaaaagggccggaaatccatatgtacacttttcaatagtagtaactattttgtgacattaggaatataaatacatgcttgcaaatgtccatattgtatttaatttgtcctgctttagttaattagcacttagtactggtatatatctgtcagtaaagtaatgcaagttgatcgatttctgcggcagcagcagagtattatagcaagcatggtgcaacacagaagctagctgtacaaatgatcactttttttccgtaggataacatgctgggttgtactatatagttatcaatcatgcccttaaagttacctttggacgtttgtttgtcgacacacatcgccggcccataatgcatccgaccatgtactcctagcatgcatatatacagtacacttggctggaatatatacagtacttacttttccaatgaggacatgtttagtagggcttaatataaaatcataaatttaactcaaaagttaagcttggagtaaagttttagagcagcctaaacattactttaccactctagttaattttgtggtagtattttagtcaactccgctttcttttttaacggagctgaatctatttggtcgagcttcagcttcaaaagaggagttggagttgaagctagccaatgcatgaatcttcttaagccaaactaaattgttaactgcttaattaatcaatgaagtgcatggtttgcataatgaaactgaagatgagatgtgagagctgatgggggtaggtggtgatgatggatgcagggattcatcgcgtcgggggtggcgttcgcggtgcagatatggtgcatcgacagggggggcccggtgttcgtggcggtgtatcagcccgtccagaccctggtggtggccatcatggcctccctcaccctcggcgagagcttctacctcggcggcatcatcggcgccgtcttcatcatcgccggcctctacctcgtcctctggggcaagagccacgagcgtgctcgcctcgccaaggacgccgccgccattgccaccgaccgcgacgccgccccttgccggatcatcgccgccggcaagcagtcctcctccgtcacccagcccctcctgctgcctacctcctcctcctccgacaacgccgtc

SEQ ID NO: 4963 - DNA, 1161 bp, Oryza sativa Japonica Group
atgggggacgcggcggcgggcgggaggaaggcggcggcgtccggcggcggcgcgcggctgcacgtggcgatgctggcgctgcagctcgggtacgccgggttccacgtggtgtcgcggctggcgctggacatgggcgtcagcaagctcgtcttccccgtctaccgcaacctcatcgccctcttcctcctcgcccccttcgcctacttcctcgagaagaaggagaggccggccatgacggcgagcttggcggtgcagttcttcttcctggcgctgtgcgggatcaccgccaaccagggcttctacctgctggggctcgagaacacctcgccgacgttcgcctccgccatccagaactccgtcccggccatcaccttcgccatggccgccgcgctccgcatcgagcgcgtccgcctctcctcccgcgacggcctcgccaaggtcgccggcacgctgctctgcgtcgccggcgcctccgtcatcacgctcttcaagggccccgccatcttcaacacccaccacaaccaccagccgcaaccgcaacagctcgccgtcgccgtcgccgccggcaacaagagctggacgctggggtgcgtgttcctgctggggcactgcgtgtcgtggtcggggtggctggtgctgcaggcgccggtgctgaagcgctacccggcgaggctgtcggtgacgtcatacacctgcttcttcggcctcatccagttcctcgccatcgccgcgttcctggagcgcgacgccgccgcctgggccgtccgctccggctccgagctcttcaccatcctctacgccggattcgtcgcctcgggcgtcgccttcgccgtgcagacgtggtgcatccaccgcggcggccccgtgttcgtggccgtctaccagcccgtgcaaaccctcctcgtcgccgtcatggcttccctcctcctcggcgagcaattccacctcggagggatcattggggcggtgctgatagtggcagggctgtacctggtgctgtgggggaagagccaggagagagccattgctgctgcaaaagaagcttctgctgctgccgccattgctgaccaccagcagcaaccagcttctgctgctgctgctgattcttgcctgaagcaaccactcctgccggcgtcgacggtggcctcagagaatgtgtga

SEQ ID NO: 4964 - DNA, 1803 bp, Sorghum bicolor
caccttccgtcagagctcaagatcggccatggactcgccaccgcttagccccgctctgctcgcgctgtccctgctcctcctcctagcgctctacatcgctcgccggcgccgcggcggaggcaggaaccggaactacccgcccgtggcgggcaccgtgttccaccagctgctcaatttcggccggctgatggagtaccagacggagctcgcccagaggtaccgcaccttccgcatgctcaccccgacctgcaactacgtgtacaccgtcgagcccgccaacgtggagtacatgctcaagaccaacttcgccaactacggcaagggggtgatgacccacgacgtgctggaggacctcctcggcgacggcatcttcaacgtggacggcgccaagtggcggcaccagcggaaggtcgccagccacgagttctccacgcgagtgctgcgcgactacagcagcggcgtgttccgcgacacggccgcggagctcgcgggcatcgtggccatggccgctggcgccggggagaggctggatgtcgccgacctgctgttgcggtcgacgctggactccatgttcaaggtcgggttcggggtcaacctgggctcgctgtccggctgcagcgacgagggcgcggcggcgttcgccagggcgttcgacgacgccagcgagcaggtcctgtaccgcttcttcgacgtgtcctggaagctcaagaggctcctcaacatctcgtcggaggcggccatgaaggggtcgatccgcaccattgatggattcgtgtacggcgtcatcgacaggaagatcgagcagatgggcagagaccaacaggaattcgccaagaaagaggacatcttgtcgaggttcctgatggagcgggagagcgatcccggctgcttcgacaacaagtacctgcgggacatcatcctcaacttcgtgatcgccggccgcgacaccacggcggggacgctgtcgtggttcctctacatgctctgcaggaaccagcacatccaggacaaggtcgcgcgggaggtccgtgccgccaccacgggcgaccgcgacgtcggcgtccaggagttcgtcgcgttcttaaccgaggacgccatcagcagaatgcagtacctgcacgccgtgctgacggagacgcttcggctgtacccggctgtgcccatcgatgtgaagtattgcttttcggatgacacgttaccggacggctacgctgtcaagaaaggtgacatggtgaactaccagccgtaccaaatgggcaggatgaagttcctgtggggcgcggacgccgaggagttcaggccggagaggtggctcggcgacgacggcgtgttcgtccccgagagccccttcaagttcacggctttccaggcggggcctcgcgtctgcttgggaaaggagttcgcgtacaggcagatgaagatcttcgcggcggtgctgctctacctcttcagatttgagatgtgggaagccaatgctaccgtgggtttccggcccatgctcacgctcaaaatggatggcccgctgtatgttcgtgcaacgctccggcaatgaggtgggcggcggtgtatgcccccatcgttctagcagcagcactttgaaagtagaattgcgctatttccatctgatgccatcttggataacgtcgaggctcagaatgtactactgtgttattttcagagatgtaggaacaagttggtcagagcaaatatggtttgaccgggtaaattattgtactgccctaagtgcttactatacaatctaaataaacactctgattcagttattatctttttaattctcat

SEQ ID NO: 4965 - DNA, 2425 bp, Zea mays
gggtgggggagggagtggaatgggtgggttcccggaagccacgggtaaccttctcgatgccgcagctcaggagttccaccctacggtctgtgccccctatcctctacagccgcttccgcaacagctatactgcccccacccatatccagccatgccggtgcctccgccgccgcaaatagccatgttacagccagtgcctccgatggcgatggccatggcgccgcagccggggtacaccttgccaacgacgacgccggtggtcaatggcccgtcgagccgcgtcgtggtgctgggccttgtcccgccgcacgcgcaggaggccgacgtggcgcaggcgatggcgccattcggcgcgatccgctcggtcgacgcgtgcgcggtggcgtccgagggcgtggccaccgtccatttcttcgacatccgcgccgccgagctcgccttgacctgtgtccgcgagcagcacatgcgccagcagagccgcctcgggcagctctacgcggcggccgccgtagccccggcgtgggctcctgcaccgacgccccaggcctgggactggccccaccccaacgacgacggccgcggcctcgtcctcgggcacgccgtgtgggcccacttcgccaccggcgccgacgacggcgacaaccgcggctccctggtggtcctgagccccctgcccggcgtctcggtcgctgacctccgccaagtcttccaggccttcggggacttgaaggatgtgagggagtcggcgcagcggcccagccacaagttcgtggacttcttcgacacgcgcgacgccgcgcgcgcgctcgccgagctcaacggccaggagcttttcggccgccgcctcgtcgtcgagttcacgcgcccttccggccccgggccccgcaggcgcgggtacgcaccccaccagcaccggcccaccgcgccgactccgccgaggcttcaagcgacgtggcgaccgtcccaaccgacgtcgtctcagccgccggcatcctcgtcgtcgtccggttccgtaagggcgagggaaggagtggtgcttctgaggaggagctcctgtaagtctagcgcgggcagcgaccagtcgtccaagggaggcaatgccggaacgagccatgagcgcaagaccaagggcggcaagatcgtggtggcggcggcggcggcatcctcgtcgaccccgacagcgtccgggaagcaaacccagaaaggcgtcgggagcagcggcggcgggagctggaaaggacgaaagagcgggtgggaggcgcgcttcctgttcaaggagcccgaggccggcggcggcgccgacacgcaagcaacgccggcttcggagatggatacgaggaccaccgtcatgatcaggaacataccgaacaagtacagccagaagctgctgctcaacatgctggacaaccactgcatccaatccaacgagtggatcgtggcgagcggcgaggagcagcccttctccgcctacgatttcgtctacctccccatagatttcaacaacaagtgtaatgtgggctacggcttcgtcaacctgacatcgccggaggctcgcgtgcggctgtacaaggcgttccacaagcagccatgggaggtgtacaactcgcgcaagatctgccaagtgacatacgcgcgcgtacaaggcctggaagcgctgaaggagcacttcaagaactccaagttcccgtgcgacagcgacgagtacctgcccgtggcgttctcgccggcgcgcgacggcaaggagcttacggatccagtgcccatcgtgggccgctcgcccgcggcgtcgtccgcgtcgtcgcctcccaagagccgggcggctagcgtggaccggcttgggcaggagctgatgccggcgccgtcgtcatccgcggacggcgcgtcgtcgaccactacgtccacccacgcgccgtccgaacacgacgaggaggaggaggagggagacatcaggctcgcaggcgagctgcggcggcttggctacgacgactagctggctccgatcctagctgcagctaggcgggcgacgcctagctcagcaacgatcggcatggcgtggcgtcgcttcgagaagcgcggaggcagtagtgacttcggccaagcttttcacagatccgtagcgctcgctcctgcacgcgcaggcgaagcaagtgaagtggactgggacttgactttggagaagcaaaagtgagctgatgttcgttggttcgtagacgctgcgcacagcaggtgtggagtcgtgttcttttggattttggtttgaagtttcctactacttgtttctttgaaacttggagctatagctagcttaggcttagctaggactgctgggaggggaaagggcatgcaggggactatcaattcgtggttcgtcatgcgctcgttctttacattaaaataagattgttattagtacagctttacaata

SEQ ID NO: 4966 - DNA, 2001 bp, Sorghum bicolor
atggagggtgggggagggagtggaataggtgggttcccgggagccccgggtaaccttctcgatgccgcagctcaggagttccaccctacggtctgtgccccctaccctctacagccgctcccgcaccagctatactgcccccacacatatccagccatgccgccgccgccgcaaatggccatgttgcagcctgtgcctccgatggcgatgcccatggcgccgcagccggggtacaccttgcccacgacggcgccggtggtcgacggcccgtccagccgcgtcgtggtgctgtgcctggtgccgccgcacgcgcaggagcgcgacgtggcgcaggcgatggcgccgttcggcgcgatccgctcggccgacgcgtgcgcggtggcgtccgagggcgtggccaccgtccatttcttcgacatccgcgccgccgagctcgccgtggcctgcgtccgcgagcagcacatgcggcagcagagccggctcgggcagctctacgcggcggccgccgtgcccccggcgtgggctcctgcaccaccgacggcgccccaggcctgggactggccccaccccaacgacgacggccgcggcctcgtcctcgggcaagtcgtgtgggcccacttcgcccccggcgccgacgacggcgagaaccgcggctccctggtggtcctgagccccctgcccggcgtctcggtcgctgacctccgccaagtcttccaggccttcggggacttgaaggatgtgagggagtcggcgcaccggcccagccacaagttcatcgacttcttcgacacccgcgacgccgcgcgcgcgctcgccgagctcaacggccaggagctcttcggccgccgcctcgtcatcgagttcacgcgcccttccggccccgggccccgcaggcgcgggtacgcgccccaccaccggcccaccgcgccgactccaccgaggcttcaacaagcgacgtggcgaccggcccagacgacgtcgtctcagccgccggcatcctcctcgtcgtcgtccgtctccgtaagggccagggaaggagtggtgcttctgaggaggccgagcgatcaggccaagggaggcaatgccggcacgagacaagagcgcaagagcaagggcggcaagaacgtggcgtcgtcggcgtcggcgccggcgtcctcgtcgaccccgacagcgtccgggaagcaagcccagaaaggtgccgggagcagcggcggcggtggtgctggcggtggcggcgggaactggaaaggacgaaagagcggctgggaggcgcgcttcctgttcaaggatcccgagtccgccggcgacgccgacacgcagtcgtcgccggcttcggagagggacacgaggaccaccgtcatgatcaggaacatacccaacaagtacagccagaagctgctcctcaacatgctggacaaccactgcatccaatccaacgagtggatcgcggcgagcggcgaggcgcagcccttctcctcctacgatttcgtctacctccccatagatttcaacaacaagtgcaatgtgggctacggcttcgtcaacctgacctcgccggaggccgccgtgcggctgtacaaggcgttccacaagcagccatgggaggtgtacaactcgcgcaagatctgccaagtcacatacgcgcgcgtacaaggcctggacgcgctgaaggagcacttcaagaactccaagttcccgtgcgacagcgacgagtacctgcccgtggcgttctcgccggcgcgcgacggcaaggagctcacggaaccggtgcccatcgtgggccggtcgcccgcgtccggcgcgtcgtcgcctcccaagagccgggcggccagcgtggacctgcttgggcaggagctgatgccggcgccgtcgtcgtccgcggacggcgcgtcgtcgaccaccacgtccacccacgcgctgtccgaacacgccgacgacgacgacaacgacgaagacatcaggctcgccggcgagctgcggcgcctaggctacgccgactag

SEQ ID NO: 4967 - DNA, 2082 bp, Sorghum bicolor
atgcacgggcggccgcggcgcccggccaagcctgaggacgaggaggcggcgtcagcgaaagccgccaagctccgggacctccaggcccaggtcctgcacaaccaccatgcccgcacgtacaccaaggaggcgattgggctgagcttcaagctgcttgagataaatccagaggcctacaccgcatggaactaccggaagcttgcgtttcagcacaatgtcaaggagctttctgacccagaggccatcaagtctgctgttgatgatgagctgagagtggttgaggttgctttaaggcagaacccaaagtcttatggggcttggtatcaccggaagtggttgctaagccaaaagctagcgcctgtggatttcaaacgtgagtttggcctcttggataaattgttgaagatggacgccaggaatttccatggatggaattaccgtaggttccttgcaagattcatgggcgtgccagatgaggaggagctaaagtatacgatggataaaatcagtgacaatttcagtaattactcagcatggcataatcgtagtatacttctgtccaacctactaatccagcagagcaaaggttttgagtcaaagcagaagattttttccgaggagtttgaacttgttactcaagctctttttacagatccaagtgaccaaagtggatggttctatcacctctggcttttagctcaaacgtctagtccagataacccccagctgattgcttcatggccttctaatgctgcaaaaggcagtgcccctttgatcaaggaaaaggttgagcagcacacactatcatccatctggtcaaggactgtacccattgttctttattttaatgatcctgtcaaaggattaaatcaatcaagtgttaacttaaagtctgatttggaattcagtgatgatattcaatggaggcccctcacaatggcagactctgggtattctaactgttgggccacatatctccaaattacaaatgaatgtagcggtttacaggaatattctgttgaagtgagcataccctgctcagatgacattgtgtctagaagtggctctaactacaattgtcctgtgcattttacatttaacattcaactgatcagcaacgacgcagcccagggtttagatatgtttcataagccagttgcctggaattgctcagagtcattccagtctcatggaaaccgtgatcctatcccttttgatctgctaaacattactagtgccttggttgaacaggactcaaattggcattttgaaagactatctgaggaaatagatcttttcagagagttacctgatgacaatagcaagtttgggaagttgacattagcccggctattgcttgcttgtgctgctgtaaaatcccgtggaagatctctaattgaaaggaagggatactgtgaagaggcactggggctcttcactgacttgattcacctggatccatctcataagcagtactatgaggatgaacggagcttagtcctgatggataagttaacatgtgacatggagactttcatgaagcactgttcagttcagcttcaaccaaattcagctcccctgaatcatgtgcaactttgcagattgtctttaacacgcattggatttgttgagcgcttgttgtgggttcaaatgctggatctaagccataatagtcttagatcagtcgaaggtttggaggctttgcagcaccttgtgttcttgaatatcagcaacaatcagatcagtagtttcacagcacttgaaccccttacgaagataatctcattgaaagttctggatttatccttcaacaagattggagctcactcaattgacacaacacggtatatctgctcatctccattctcgcacaaaatcgaagcaagtgaagcttttgaagagtatcagaaggtaaatatcaacgtggaggaatactgggacaccatactgttcttcagatctctgaagttggcacagcttgatatcaaaggaaatgaagttgccagcaaggagaacttcagaagtcttgtcgtgacgctcattccttgtctaaaatggtttgatggtgaaggtgtgaattaa

SEQ ID NO: 4968 - DNA, 2359 bp, Zea mays
aactattactagtagattattcaaacacccgtctagttctacttgttggaagggtgccgctctccacgagatccaaacccccgcacccgcggcgccggcgacgcagggaggaggcgatgcacggccgcccgcggcgaccggccaagcccgaggacgaggaggcggcgtcagcgaaagccgccaagcttcgggacctccaggcccaggtcctgcacaatcaccatggccgcacgtacacaaaggaggcaattgggctgagcttcaagctgctcgagataaatccagaggcctacaccgcatggaactaccggaagcttgcgtttcagcacaatgtcaaggagctttctgatccggaggccatcaagtctgctgttgatgatgagctgagagtggttgaggttgctttaaggcaaaacccaaaatcctatggagcttggtatcaccgtaagtggttgctatgccaaaagctagcgcccgtggatttcaaacgtgagtttggcctcttggataaactgttgaaggtggacgccaggaattttcatggatggaactacagaaggttccttgcaagattcatgggtgtgtcagatgaggaggagctaaagtatactatggataaaatcagcgacaacttcagtaattactcagcatggcataatcgtagtatacttctgtccaacctactgatccagcagagcaaaggttttgagtcaaagcagaagattttttccgaggagtttgaacttgttactcaagctctttttacagatccaagtgaccaaagtggatggttctatcacctttggcttttagctcaaacgtcttgtccagataacccccagctgattgcttcatggccttctaatgctgcaaagctcagttcctctttgatcaaggaaaaagctgagcagcacagacagtcatccatcttgtcaaggactgtacccattgttctttattttaatgagcctgtcaaaggattaaatcaatcaagtgttaacttaaagtctgatttggagttcagtaaggatattatatggaggcccctcacaatggcagactctgggtattctaactgttgggccacagatctccagattataaatgaatgtagcagtttgcaggaatattctgttgaagtgagcataccctgctcgaatggcattgtatctagaagtggctctaactacaattgtcctgtgcattttacatttggcattgaattgatcagcaacgatccagtacagggtttagatatgtttgataagccagttgcctggaattgctcagaatcattccagcctcatgggaaccgtgatcctatcccttttgatctgctaaagattactagtgccttgatcgagcatgactcaaattggcattttgaaagactatctgaggaaatagatcttttcagagagttacctgatgacaacagcaagtttgggaagttgacattagcccggttattgcttgcttgttctgctataaaatctcgtggaagatctctaattgaaaggaagggatactgtgaagaggcactggggctcttcactgacttgattcacctggatccatctcataagcagtactatgaggatgaacggagcttagtcctgatggataaattaacatgtgacatggagactttcatgaagcactgttcagttcaggttcaaccaaattcagctcccctgaatcatgtgcagctttgcagattatctctaacatgcattggatttgctgaacgcctgttgtgggttcaaatgctggacctaagccataatagtctgagatcagtcgaaggattggaggctttgcagcaccttgtgttcttgaacatcagcaacaaccagatcagtggtttcacagcacttgaatcccttacgaagataatctcattgaaagttctggatttatctttcaacaagattggagctcactcaattgacacaacacggtatatctgctcgtctccattctcacacaaaatggaagcaagtgaagcttttgaagcgtaccagaaggtaaatatcaacgtggaggaatactgggatgccatactgtttttcagatctctgaagttggcacagcttgatataaaaggaaatgcagttgcaagcaaggagaacttcagaactattgtcatgatgctcattccttgtctaaaatggtttgatggtgaagatgtcaattaaaatggagttgagcaatgatagtgtcaaggctcacgctgtaaaccattttttgctagaaggcattgatttgcatcatatgtactgctatatttgtttaaaaaactcggccggtaggggaaagaccgtccccctcctgtattatattaaaaaaaaaaaaaaaa

SEQ ID NO: 4969 - DNA, 2372 bp, Hordeum vulgare subsp. vulgare
ggagaactctcctctgctcgagatccaactccccgcgacccccagccgtcaccggagcagcaacgagatgcacggccagcctcgccggccgaaacagccggaggacgacgcggcggcggcggcgaaggccgccaaactccgagaactccaggtccaagtcctccacaaccaccatacctgcacgtacaccgaggaggcgcttgggctgagcttcaagctcctcgagataaacccggaggcctacacggcgtggaactacaggaagctcgcgctgcagcacaacctcaaggagctctctgatccagaggccatcaaatcttctgtcgatgccgagctcagagtggtggagcttgccctgaggcagaacccaaagtcctatggagcgtggtatcatcgcaagtggttgttgaaccagaagcttgcccctgtggatttcaagcgcgaatacggcctcttggataaactgttaaaggtggatgcgaggaatttccacggatggaattaccgcaggttccttgcaaaatttatgggggtgccagaagagaaagagcttcagtacacaatggataagatcggtgaaaatttcagtaattactcagcatggcataatcgtagtatacttctgtccaatctgctaatccaaagaagggaaggttttgagtcaaagcagaagatcttttcagaggagtttgaacttgtgattcaggcactttttacagaccctagtgaccaaagcggttggttctatcacctctggcttttagctcagacatctacccctgataacccacagctgatttcatcttggccttctcatggtgcaaagctcagtttattttcggcaaggaaaaatgaagaccagaacatggtgtcttccccgagctccatttgttgttactctttgaaggaagggattatacccattgtgctttatttcaatgatcccgtcaaaggattaaatccatcaaatgtaaagttaaattctgattttgtgtttgataaggatgtccagtggaggcccctcgcgataactgactctgggtattctaattgttgggccacatatcttgaaattgcaaacaaagattgtagcactccacagcaattttctgttgaagtaagcataccctgctcaaatgatatcatgtcaagaagtggctctcactgcaattgccatgtacattttacgtttaccattgaactgggcaccaataatgatgaagcacatgatatcgatttgtttcatgatccaatctcctggagtagctcagaatcattccagtctcatgggaaacccagttgtgtcgcttttgatcagctaaatatcaccagtgccttggttcaagaagagtcaagatggaatttggatagactatctgatgaaatcgaccttttcagagatttaccagatgagaatagtaaatttgctaagttgacactagcacggctattgcttgcttgcgctgcaataaagtcccgtggaagttctttgattgaaaggaaggggtactgcgaagaggcgctagggttcttcagtgacttgattaatttggatccttctcataaaaggtattatgaagatgagcggagcttagtcctaatggatcagctaacatgtgacatggaggctttcatgaagtactgttcagtccaagttagatcaaattcagctccattaaaccatgtgcaactttgcagattgtctttaacacgcattggatttactgaacgcatgttgtgggttcaaatgctggacctaagccataacaagctcagatcaattgaaggtttggaggccttgcagcagcttgtgtgcctgaacatcagcaataaccagctcagcagtttcacgtcactcgaacccctgacgaagatttctttgaaagcgttagatttatctttcaacgagatcggagctcacccgatcgacacaacacggtatatatgctcatctccgttttcgcacaaagtcgaacggtgtgaagccttcgaggagtgccgaaagaaaaacgtcaacgtggaggagttctgggacgccatactcttcttcaaatccgtgaacctggtgcagcttgacatcaagggaaatgcggttgccgacaaggatagcttcgcgaccgtcgtgacgacactcagcccttctctgaagtggctcgacggcgcatgtatccattagctgttcatcggagagtggaaattgtgataggatggggaaagtaaacactgtacactgctattgtctgattcatgtattattacagttaagcagctctgagagactaatacaattatacaagtattccttggctgttgtttctcaattgttctttttctaaggaactattttaaccagtgtgattactgttagaatc

SEQ ID NO: 4970 - DNA, 2328 bp, Hordeum vulgare subsp. vulgare
ggtatatgcaaaacccgtttacccactgtaggagaactctcctctgctcgagatccaactccccgcgacccccagccgtcaccggagcagcaacgagatgcacggccagcctcgccggccgaaacagccggaggacgacgcggcggcggcggcgaaggccgccaaactccgagaactccaggtccaagtcctccacaaccaccatacctgcacgtacaccgaggaggcgcttgggctgagcttcaagctcctcgagataaacccggaggcctacacggcgtggaactacaggaagctcgcgctgcagcacaacctcaaggagctctctgatccagaggccatcaaatcttctgtcgatgccgagctcagagtggtggagcttgccctgaggcagaacccaaagtcctatggagcgtggtatcatcgcaagtggttgttgaaccagaagcttgcccctgtggatttcaagcgcgaatacggcctcttggataaactgttaaaggtggatgcgaggaatttccacggatggaattaccgcaggttccttgcaaaatttatgggggtgccagaagagaaagagcttcagtacacaatggataagatcggtgaaaatttcagtaattactcagcatggcataatcgtagtatacttctgtccaatctgctaatccaaagaagggaaggttttgagtcaaagcagaagatcttttcagaggagtttgaacttgtgattcaggcactttttacagaccctagtgaccaaagcggttggttctatcacctctggcttttagctcagacatctacccctgataacccacagctgatttcatcttggccttatcatggtgcaaagctcagtttattttcggcaaggaaaaatgaagaccagaacatggtgtcttccccgagctccatttgttgttactctttgaaggaagggattatacccattgtgctttatttcaatgatcccgtcaaaggattaaatccatcaaatgtaaagttaaattctgattttgtgtttgataaggatgtccagtggaggcccctcgcgataactgactctgggtattctaattgttgggccacatatcttgaaattgcaaacaaagattgtagcactccacagcaattttctgttgaagtaagcataccctgctcaaatgatatcatgtcaagaagtggctctcactgcaattgccatgtacattttacgtttaccattgaactgggcaccaataatgatgaagcacatgatatcgatttgtttcatgatccaatctcctggagtagctcagaatcattccagtctcatgggaaacccagttgtgtcgcttttgatcagctaaatatcaccagtgccttggttcaagaagagtcaagatggaatttggatagactatctgatgaaatcgaccttttcagagatttaccagatgagaatagtaaatttgctaagttgacactagcacggctattgcttgcttgcgctgcaataaagtcccgtggaagttctttgattgaaaggaaggggtactgcgaagaggcgctagggttcttcagtgacttgattaatttggatccttctcataaaaggtattatgaagatgagcggagcttagtcctaatggatcagctaacatgtgacatggaggctttcatgaagtactgttcagtccaagttagatcaaattcagctccattaaaccatgtgcaactttgcagattgtctttaacacgcattggatttactgaacgcatgttgtgggttcaaatgctggacctaagccataacaagctcagatcaattgaaggtttggaggccttgcagcagcttgtgtgcctgaacatcagcaataaccagctcagcagtttcacgtcactcgaacccctgacgaagatttctttgaaagcgttagatttatctttcaacgagatcggagctcacccgatcgacacaacacggtatatatgctcatctccgttttcgcacaaagtcgaacggtgtgaagccttcgaggagtgccgaaagaaaaacgtcaacgtggaggagttctgggacgccatactcttcttcaaatccgtgaacctggtgcagcttgacatcaagggaaatgcggttgccgacaaggatagcttcgcgaccgtcgtgacgacactcagcccttctctgaagtggctcgacggcgcatgtatccattagctgttcatcggagagtggaaattgtgataggatggggaaagtaaacactgtacactgctattgtctgattcatgtattattacagttaagcagctctgagagactaatacaattatacaagt

SEQ ID NO: 4971 - DNA, 2400 bp, Oryza sativa Japonica Group
tggggattctaagttccaacaatccaatctcctcctcttcctcctctccttgagatccgatccaatccaaccctgcggcagccgcctcgccggaggaggaggatgcacggccggcctcgccgcccggacaagccggaggacgcggcggcggcggaggccaaggccgccaagctccgcgtcctccaggcacaggtcctgcacaaccaccactcccgcacctacaccaaggaggcactcgggctgagcttcaagctgctagagattaatcctgaggcgtacacagcatggaactaccggaagctcgcgtttcagcacaacattggggagctttccgagccggaggccatcaaatctgccattgatgatgagctcagagtggtagaggttgcattgaggcagaacccaaaatcctacggggcttggtatcaccggaagtggttgctaaatcaaaagctcgccccagtggatttcaagtgtgaatttggcctcttggataaactactgaaggtggacgcaaggaatttccatggatggaattaccgcaggttccttgccagattcatgggggttccagaagaggaagagcttaagtacactatggataagataagtgacaacttcagtaattactcagcatggcataatcgcagtatacttctgtccaatctgctaatcaaacagagcaagggtttcgagtcaaagcagaagatcttttcagaggagtttgaacttgtaactcaggccctttttacagacccaagtgatcaaagtggatggttctatcacctttggcttttagctcagacatctagtccagagaatccacagctgattgcttcgtggccttctaatggttcaaacctcagtttatcttccttgagctccatttgttgttactcactgaaggaagggattctaccaattgttctttattttaatgagcctgtgaaagggttaagttcatcgagtgtgagcttgaattctgatttggtggttagtaagaacattcagtggaggcccctttcagtaacagattctggacattctaactgttgggtcacttatcttgaagtatcaaacttggaatgtaacagtttgcagcaattttcagttgaagtaagcataaccaattcagatgaaattgtgtccagaagcggctctaattataactgtcccgtgcatttctcatttacctttgaactcagcaacaatgatagtacagccaaggatattgatccaattcatgaactaatctcctgggatttctcagagccactcctgtctcatgtaaaccccagttgtatctgttttgagcagttaaagatcactaattcattggttcacaaggagtcaaattggcatttggagagactatctgatgaaatagacctatttagagaattgcacgatgacaatagcaagtttgcaaagttgacattagcacgcttattgcttgcctgtgctgcaataaagtcccgtggaagttctcttgttgaaaggaagggatactgtgaagagtcgctcgggctctttaatgacttgatcgacctggatccatctcataaaaggtactacgaggatgagcggagcctagtcttaatggatcagttaacatgtgacatggaggctttcaagaaatactgttcagtcaaagctctaccaaagttagctccattaaaccatgttcagctttgcagattatctttaacgcgtattggatttgctgaacgcttgttgtgggtccaaatgctggacctaagccacaacaacctcagatcgattgaaggtttggaggctttgcagcagcttgtatgcttgaacctcggcaacaaccagatcagtagtttcacagcacttgaaccactcacgaagataatttctttgaaagtactggatttatcttgcaacgagattggaactcacccaatcgacacaacccggtacatctgcccatctccattctcacatagagttgaagcatgtgaagcttttgaagaatgccggaagaaaaatattaacgtggaggaattctgggatgccatactgttcttcaaacatgtgaatttggtacagctttgccttgaaggaaatgcagttaccaacaaggagaacttaagaactcttgtggtgacactcaatccatctctaaaatggcttgatggcaaatttgttcattagctgtctgtcttatacaaactttggataggatggtcatgttgtatactgtttcattatcggtttttaggaacattaggtggcaatttttgtatggcccatttcaccatttgtactggaatactgggtttcaaagcaaatttgagacacgatcatggtaattgcagagttctttctgctttgaacgagtgaattgttaaaaatgatggtattgcagagtagaag

SEQ ID NO: 4972 - DNA, 2442 bp, Sorghum bicolor
ctgcactgcaagcgcggatctcaactcggagtacaatacaagcagcgagttcggccgatgtgaattgccattgccagaggtgttattgccttcttggtcgctgctatggttgacttccggcacgcgcggtctcttctcgccgccggcgtcctcctagccggcgtcgtcgtcgccgtcctcggcgccggcgaggacgatgagcacttcgtctactcgggcttcaccggcgcgccgctcgcgctggacggcacggccaccatcacggcgtcggggctgctggagctcaccaacggcacggcgcagctcaagggccacgcggtgcacccggcgccgctgcggttccagcggacgcctggcggtcccgtgcgctccttctcggcgtctttcgtgttcggcatcatcccaccttactccgacctcagcggccacggtatcgtcttcttcgtcggcaaggacagcttcgccaacgcgctgcccagccagtacctgggcttcctcaacaccaacaacaacggcaacgccagcaaccgcgtcttcggcgtcgagctcgacaccatccggagcaccgagttcaaggaccccgacgacaaccacgtcggcatcgatatcaacagcctcacgtccgtcaacgccaccaacgccggttactacgacgacggcaccggcgagttccacaacctgacactgatcagcgccaagcccatgcaagtctgggtggactacgacggcgagaccgcgcggatcaacgtgttcctgactcccctcgggacgtccaagccttccaggcctctggtgtcggccacgtggaacctctcggacgtgctcgtggagccggcgtacgtgggcttctcgtccgccacgggcacggtgaagtcggagcactacgtgctcggctggagcttcgccatggacggccctgctccggacatcaacgtcgcgagcctgcccaagctaccgcggttcggccccgagccgcggtccaaggtcttggagatcgtgctgccgatcgccaccgcggcgttcgtcctcgccgtggtggcggtcgtggtcgccctggtccggcggcggctcaagtacgccgagctgcgtgaggactgggaggtcgagttcgggccgcaccggttcacgtacaaggacctgttccgcgccaccgagggattcaagagcaagatgctgctcggcgtcggaggattcgggagagtgtacagaggagtgctcccgaaatcgaagctggaggtcgccgtcaagaaggtgtctcacgaatcaaggcagggcataaaggagttcgtcgccgaggtcgtcagcatcggccgtctccggcaccggaacctcgtgcagctgctcggttactgccgacggaaaggcgagcttctcttggtgtacgactacatgcccaacggcagccttgacaagtacctatacggcaagggcgacgacgacaaggccatggccacgctggactgggttcagaggttccggatcatcaaaggcgtggcgtcagggctgctgtacatccacgaggactgggagcaggtcgtcatccaccgagacatcaaggccagcaacgtcttgctcgacagcgagatgaacggacggctaggagactttggtctcgcgaggctgtacgaccatggagccgatccgcagacaacccatgtcgtcggcacgatggggtacctcgccccagagctggcgaggtcagggaaagcgtcccctctaaccgacgtgttcgccttcggggcgttcatcctcgaggtcgtgtgtggccggagacccgtggagcagagcatgaccgacagccggctcatgctggtggactgggtgctggagcactggcagaagggatcgctcgccgaggtgatcgacgcgaagctccagggttgttacgacgacgaggaggccatgctggcgttgaagctagggctgctgtgctcgcacccgctgcccgccgcgaggccgagcatgcggcaggtgatgcagtatctcgacggcgacatgcccttcccggagctgacgccgtcgcacctcagcttcagcatgctggccctgatgcggagcgaagggttcgattcgttcgtcctgtcggcgtccacgaatccgtcgtcgtccacggcgatgagcatcgggaccatgactggcctctctggcgggagatgacatatattactccgtattgacatgtgcgttgtcttgttggagcatgtacagttacactagatgtcgccagttcattagctagtgctactagtctgctctgctgtagagttgccaattttccaaaagacaaaatttctcaaagctgtaaatctcttctgtgaaatattatgagctggtcgctgcaagaggcgcaatgatcagagcgtggcaacgagccaacgatcacttgatcagaccttgtacccagaaaattgtgttctacgaaaaaaaatcatctaccaagcc

SEQ ID NO: 4973 - DNA, 2479 bp, Zea mays
aagagcgcgattgcactgcaagcgcagatctcaattaggactacacaacaagtggagttcgacggatgtgaagtgaattgcggcctttcttggttgccgtcttgctgctatggttgacttgcggtccctactcgccgccggcgttgtcctcctcgccggcctggccgtcctcgtccacggcgccggggacgagcagttcgtctactcgggcttcaccggcgcgccgctcgcgctggacggcacggccgccatcacgccgtcggggctgctggagctcaccaacggcacggcgcagctcaagggccacgccgtgcacccggcgccgatgcggttccagcggacacccggcgggcccgtgcgctccttctcggcgtccttcgtgttcagcatcatcccgccctactccgacctcagcggccacggcatcgtcttcttcgtcggcagggacagcttcgccaccgcgctgcccagccagtatctgggcttcctcaactccagcaacaacggcaacttcaccaaccacgtcttcggcgtcgagctcgacaccatccggagcaccgagttcaatgaccccaacgacaaccacgtcggcatcgacgtcaacagcctcacgtccgccaacgccagcaccgccggctactacgacgacggcaccggcgcgttccacgacctgaccctgatcagcgccaagcccatgcatgtctgggtggactacgacggcgagacggcgcaggtcaacgtgttcctggctcccctcaggacacccaagcctaccaggcctctggtgtcggccgcgcagaacctgtcgggagtggtcgtggacccagcgtacgtgggcttctcgtccgccactggcacggtgaggtcggagcactacgtgctcggctggagcttcgccatggacggccctgctccggacatcgacatcgccagcctgcccaagctaccacggttcggccccaatccgcggtccaaggtcttggaggtcgtgctgccgatcgccaccgcggcgtccgtcctcggcgtggtggcggtcgtggttgcgctcgtccgacggcggctcaagtacgccgagctgcgggaggactgggaggtcgagttcgggccgcaccgcttcacgtacaaggacctgttccgcgcgacggagggattcaagaccaagatgcttctcggcgccgggggattcgggagagtgtacaggggagtgctcccgaaatccaagcgggaggttgccgtcaagaaggtgtctcacgaatcgaggcagggcataaaggagttcgtcgctgaggtggtcagcatcggccgtctccgacaccggaacatcgtccagttgctcggctactgccggcggaaaggcgagcttctcctggtgtacgactacatgcccaacggcagccttgacaagtacctctacggcaaggacgacaaggccacggcgacgctggattgggcgcagaggttccggatcatcaaaggcgtggcgtcagggttgctgtacatccacgaggactgggagcaggtggtcatccaccgagatatcaaggccagcaacgtcttgctcgacagcgacatgaacggacggctgggggactttggtctcgcgaggctgtacgaccatggagccgaccctcaaacaacccatgtcgtcggcacgatggggtacctcgccccggagctggcgcggtcagggaaagcgtcccctctcaccgacgtgttcgccttcggggcattcatcctcgaagtcgtctgtggccggagacccgtggagcagagcatgaccgacagccggctcatgctggtggactgggtgctcgagcactggcagaacgcaaccctcgccgacgtgatcgacgcgaaactcaaggggagttgcgacgacgaggaggccatgctagcgttgaagctagggctgctgtgctcgcacccgttgcccgctgcgaggcccagcatgcggcaggtcatgcagtatctcgacggcgacatgcccttccctgagctcacgccgtcgcacctcagctttagcatgctggccctcatgcggagcgaagggttcgattcctttatcctgtcggcgtcgacgacgcagccgttgtcgtccacggcgatgagtatagggactatgactggcctctctgatgggagatgacgagcgcgctgtcttgctggagcatgtacattggatggcgccagtacgtaccagtagtacgctatgctgtagagttgccaattttacaatttcttgaagctggaggagcaactctaccaataacatgtaacaccccacccattcccggaccggtgctattttctcctgacaaccatctaaaaccatagatcatcctcatagaacagcacaagtattttgtacgcattttatccttacttatgtgtgcccaagactttccgaccaaaaaaaaaaaaaaaaaaaaaaaaaaaaaaaaaaaaaaaaaaaaaaaaaaaataaaaaaaaaaaaaaaaa

SEQ ID NO: 4974 - DNA, 2200 bp, Hordeum vulgare subsp. vulgare
gggcggctgcactggctgagagcaccacaccagtggcatggccggcatggagagcccgtggcgcccccttctcgcggctctcctcctagtgtgtttcggcgccgccgttctgggcgacggagatggcgagcagttcgtctaccccggcttcgccggcgcgaacgccaccctggccctggacggcacggccgtcgtccagccgagcgggctcctggagctgaccaacggcacggcccagctcacgggtcacgcggttcaccggacgccgctgcgcctgcggaggtcgccgggcgacggcgtgcgctccttctcggcgtccttcgtgttcggcatcattcccccgtactccgacctcagcggtcacggcatcgtcttcttcgtcgggaaggacaacttctcggccgcgctgccgagccagcacctgggcctcctcaacagcttcaacaacggcaacgccaccaaccacatcttcggcgtcgagctggacaccatcctgaacaaggagttcaacgaccccaacgacaaccacgtcggcatcgatgtcaacagcctcgagtccgtcgcagcgcgccccgccgcctactacgacgagaagagcggcgcgttccacgatctgcttctgatcagcggcaaggcgatgcaggtctgggtggactacgagagcgagtccacgcagatcaacgtgttcctggcgcccctgaagaatggcgccaaaccttcgacgcccctggtgtcagccaagaggaacctctcggaggtgctcgtggagccggcgtacgccggcttctcgtcgtcgacgggcacggtcaggtcgcgccactaccttctcggctggagcttcgccatggacggccccgcacctcccatcgacataggcagcctgccgaagctgccgttcgtgggcgtcaggccgcggtcgagggtgctggaaatcgtcctgccaatcgccaccgcggcgttcgtcctcggcgtggtcggcgtggtgatcctgctcgtccggcggcggtccaggtacgcggaggtgcgggaggactgggaggtggagttcgggccgcacaggttctcgtacaaggacctgttccgcgccacggaggggttcaagggcaagaccctgctgggcttcggcggcttcgggagggtgtacaagggggtgctccccaagtccaagctggaggtggcggtgaagaaggtgtcgcacgagtcgaggcagggcatcaaggagttcgtggcggaggtggtgaccatcggccggctccggcaccgcaacctcgtgcagctgctcggctactgccgccggaagggggagctcctcctggtctacgactacatgtccaacggcagcctcgacaagtacctgtacggcggcagcaaggacaaggagaagccggcgctggactgggcgcagaggttcgggatcatcaagggcgtggcgtcgggcctgctctacatccacgaggacttcgagcaggtcatcatccaccgggacatcaaggccagcaacgtgctcctggacgccgacatgaacggccggcttggcgacttcggcctggcgcgcctgtacgaccacggcgccgacccgcagacgacgcacgtggtcggcaccatggggtacctggccccggagctggcgcgcacggggaaggcgtcccctctcaccgacgtcttcgccttcggcgccttcatcctggaggtggcctgcggccggaggcccgtggagcaggccatgaacgacagccgcctcatgctcgtcgactgggtgctcgagcactggcagaaggagacgctcctcgaggtggtcgacgcgaggctcgacggcaactacgacgctggcgaggtcgtcctggcgctcaagctgggcttgatgtgctcgcatccgatgcccggcgcgaggccgagcatgcggcaggtcatgcagtacctcgaaggcgacttgccgatccccgagttgacgcccacgcagatgagcttcagcatgctggccctgatgcagagccaagggtttgactcgttcgtcttgtctgcggcgtcggatccatcgtccgccacgatgatgaccatgggcacgatcactggactctccggagggagatgacatgataattttcaacgactcgtgagttgttgcgccgtgcagatgttgatcgggtggttgtcgcgagcactagtattggcaatttggcagagctaattattccatcac

SEQ ID NO: 4975 - DNA, 1451 bp, Zea mays
gtgctgcaccaccttcactccccccgtcactccggcgagcgagcaggagcagaccgatggcgtctcccgctgccgtcaagaaggtgctggtgccgatcgcggcgggctcggagcccgcggaggcgttcgtccccatcgccgtcctccgccgcgcgggtgccgacgtcaccgtggcggccgccggagccggaaccggcctgcgcgtccacgccatgtacggggtcaccgtcgtcgcggacgccagcgtcgccgactgcgccgacgcctcctacgacctcgtcgtcctccccggcggcgtccccggcgctgacaacctgggcggctgcgcggcgctggagagcatcgtgaggcgccacgcgctcgggggcgggctctgcgccgccatctgcgccgcgctgccgctggcgctggcgcgctggggcctgctcgacggcgtcaaggcaacggctcacccggagttcgtggacaagttcccggcagaggtggccgccgtggacgcgaacgtggtggtcgacggcagggtcgtgacggggcgtggccccgcggcggccatggagttcgctctcgctctcgtggaccagctctacggcaagggcaaggtcgacgagatcgccaaacccatgatggtcaggtacgaamcagggtacgccttcgaggaactgaacccggttcagtggcggtgcagcggcacgcccagggtcctgataccagtggccaacggcagcgaggagatggaggtgctcgtgaccgccgacgtgctgcgccgggccaaggcggacgtcgtggtggcgtcggccgaggaggtcgtcgtcgcgcgccacggcaccaggatcgtcgccgacgcgctgctgcaggacgccgccggccagcagttcgacctcatcgtcgtaccgggtggcatgccgggcgtgaagacgacgctggcagacaaggtggagctcatggcgctgctgaaggagcatgcggcggcgggcagggcgtacggcgccattggcgccgccacggcgcaggtgctggagccgcacggcctcatcgggggcagcatgaaggcgacgacgtgcgcgtccagggcggaccggcccagtgagtgcgggagcagggtggtggtggacgggaacctggccacgagcgggagcaccgggacggccatggagttcgcgctggccgtcgtggagaagctgctcggccccgaggcggcgcgggaggtggcggaagccctgctcttcgtctgaccatcaccggaccagcgaccacgtacggagtggagctgttgggcccttccgcgcgtactaataaaatctactccctattaaggctgcaatagtagtctgccattccgcgttctgccgccattcccatgttctgccaccattctatatctgtcattctcattctccctcctcgcaaagcccattcccattctcattcccccgtgaaaaaaaaaaaaaaaa

SEQ ID NO: 4976 - DNA, 1204 bp, Zea mays
cggagccggaaccggcctgcgcgtccacgctatgtacggggtcaccgtcgtcgcggacgccagcgtcgccgactgcgccgacgcctcctacgacctcgtcgtcctccccggcggcgtccccggcgcggacaacctgggcggctgcgcggcgctggagggcatcgtgaggcgccacgcgctcgggggcgggctctgcgccgccatctgcgccgcgccgccgctggcgctggcgcgctggggcctgctcgacggcgtcaaggcaacggctcacccggagttcgtggacaagttcccggcagaggtggccggcgtggacgcgaacgtggtggtcgacggcagggtcgtgacggggcgtggccccgcggcggccatggagttcgctctcgctctcgtggaccagctctacggcaagggcaaggtcgacgagatcgccaaacccatgatggtcaggtacgaaccagggtacgccttcgaggaactgaacccggttcagtggcggtgcagcggcacgcccagggtcctgataccagtggccaacggcagcgaggagatggaggtgctcgtgaccgtcgacgtgctgcgccgggccaaggcggacgtcgtggtcgcgtcggccgaggaggtcgtcgtcgcgcgccacggcaccaggatcgtcgccgacgcgctgctgcaggacgccgccggccagcagttcgacctcatcgtcgtaccgggtggcatgccgggcgtgaagacgacgctggcagacaaggtggagctcatggcgctgctgaaggagcatgcggcggcgggcagggcgtacggcgccattggcgccgccacggcgcaggtgctggagccgcacggcctcatcgggggcagcatgaaggcgacgacgtgcgcgtccagggcggaccggcccagcgagtgcgggagcagggtggtggtggacgggaacctggccacgagcgggagcaccgggacggccatggagttcgcgctggccgtcgtggagaagctgctcggccccgaggcggcgcgggaggtggcggaagccctgctcttcgtctgaccatcactggaccagcgaccacgtacggagtgtagctgttgggccctttcgcgtgtaccgtcgtgtgcaccggatcgtgtttgatccttcctcgcttgataacgtcggacccaaagtaattatcttcgtaataaaaactcaaaaagtatcgtt

SEQ ID NO: 4977 - DNA, 1638 bp, Sorghum bicolor
gctccgcctccactcccgagctcgtcactccggcaaccgagcagaagcaggccggtggttccggtgacctcccgatggcgtctctcgctgccgtcaagaaggtgctggtgctggtgccgatcacggcgggctcggagcccgtggaggcgttcgtccccatcgccgtcctccgccgcgcgggcgccgacgtcaccgtcgcggccgcgggtgccggagccggcctgcgcgtccacgccatgtacggggtcaccgtcgtcgcggacgccaacgtcgccgactgcgccgacgcctcctacgacctcgtcgccctccccggaggcgtccccggcgcggacaacctcggcggctgcgcggcgctggagagcatcgtgaggcgccaggcgctcgggggcggcctgtacgccgccatctgcgccgcgccgccgctggcgctggcgcgctggggcctgctcgacggcgtcaaggcaactgcgcatccggcgttcgtggacaagttcccggcggaggtggccgccgtggacgcgaacgtggtggtcgacggcagggtagtgacggggcgtggcccggcgccggccatggagttcgcgctcgctctcgtggaacagctctacggcaaggacaaggttgacgagattgccaaaccaatgatggtcagatatgaacccgggtacgccttcaaggaactgaacccggtccagtggcagtgcagcggcacgcccaaggtcctgatcccggtggccaacgggagcgacgagatggaggtgctcgtgaccgtcgacgtgctgcgccgggccaatgcggacgtcgtggtggcgtcggccgagggcggcgacgccgaggtcgtcgtcgtcgcgcgccacggcacgaggatcgtcgccgacgcgctgctggtcgacgccgtcgccgccggccagcagttcgacttcgtcgtcgtgccgggcggcatggccggcgccaagacgctggccggcacggaggcgctcgtggcgctgctgaaggagcatgcggcggcgggcagggcgtacggcgccatcggcgccgccacggcggaggtgctggagccgcacggcctcctcgagctcgagggcaagaaggcgacgacgacgtgcgcgtccatggcggactcccgcgagtgcgggagcagggtggtggtggacgggaacctggccacgagcagcggccccgggacggccatggagttcgcgctggccgtcgtggagaagctgctcggcgccgaggcggcaagggaggtggcggaagccctgctgttcgtctgacgacggaccacgggcggagatgagctgtgcctgtgctatttgatcctttgcagtagagatcatggaacgtggccggaccttccttgtcataacatcatctgagaatttggtatctcgatcgtgtagtgtagtaaaaattctatacaagtatcgttacttatatagagaggtgggacttgggttaagccataccgcctcaggatggtcctcttgtgatttttgccgctctttggaccatgatatctaggcacgtaagacgtgtcaaggtgtcgttgtggtgctacgtttttttcaatagcccaagcacagctcatggtacccaaaaaaaagtctttatatcgtatcattaattttttagttt

SEQ ID NO: 4978 - DNA, 1928 bp, Sorghum bicolor
ccggaaggaaagccaaagcggcggaacgcgccagacagagtagccggatagagacccacctctccctcccggagtccgtccgtcccgctcccgcaccgcctttccgccgagtaacaaggcaagaatcccgcggcgacggtcaacgattccggatggccgcagcgtcctcggtggtcaggcgtgccgccgccgccgcctccgcctcgcgcggcctgctcctcgcccgcgccttcgcctcgggagttggcggcggcgagaaggccaagcgggtgctggtgccggtggccgccggcacggagccgatcgaggcggcggccaccgccgacgtcctcaaccgcgccggcgcgcgggtcaccgtcgccactgccgacccgcccggggacgacggcctcgtcgtccaggccgcctacggcgtcaagttcgtcgccgacggccgcgtcgccgacctgcagggggagtccttcgacctcatcgccctgccgggaggaatgcctgggtcagttggcctcagagattgcaaagcgctcgagaagatggtcaagacgcacgccgagaatgggggcctgtacggcgccatctgcgctgcgcccgcggtgacgctggcctattggggcatgctcaaaggcttaaaggcgacctgttatccgtcgttcatggagaagttcactgcagaggtgatccctgtggactcgagggtcgttgtcgacagaaatgcagtcaccagccagggtccaggaactgcgatcgagtttggtcttgctttggtggagaagctgtatggcaaagagaagatggaggaggttgctgggcctctgtacgtgcgccctcaacatggagctgaatataccgtagaagagcttaattcggctgaatggaaatgtagtagcacacctcaggttcttgttccggttgctaatggttcagaggaaattgaagctgtcaatttgatagatgtgttgcgtagagcaggagcaaatgttattgttgcatcggtggaggagaagttacaaactgtgacccgtcgccataagttcaatctaattgctgatatgatgttggatgaagccactgaaatgcaatttgatttgattgtcatgccgggaggtttgcaaggtgctcagaagtttgctagtacaaagaaacttgttgacttactcaagaaacaggcagaatcaaataaaccatatggtgcaatatgtgcctctccagctcatgtgcttcagccacatggtttactgaagggcaagaaggcgacagcatttccacctatgtcacacctgctcacagatcagagtgcatgtgagcatagggttgttgtagatggtaaccttatcaccagtagagccccaggcactgcaacagagttcgccctagccattgttgaaaaactgtttggtcgagataaagctgtcagcatagccaaggaaatgatctttatgtgatattgcactgacctggtggtgtgagaagtataataatgtgaataaacataacagaaacctgttagtcatgcttctggttctatgcctgaactggtaatagctgcctgaggatttcaattgaatacttgaatggtactattacatcacactgtaaactgtgaaccaagatcgtacattttgcataccataagagaaaggttagtgtgactcgttacttgtaaatacttgtcctgtctgttcagtgaaacaccaagtggaggtgctgccttcccaccacccacctgctctgcctctaatcatcatggatttacacgaagttaagaagctgtttggtcaatcaagagagagtgcaggacattggcagcaatctggtcttcatgtcacagtaaactgtactgtaagctattgatttgataagcactgtactctttacgatgtacgaactcttttatccttgttattacagctcttctttttttgtttctg

SEQ ID NO: 4979 - DNA, 1792 bp, Zea mays; identical to SEQ ID NO: 1130

SEQ ID NO: 4980 - DNA, 1836 bp, Zea mays
aattcttctccgtcctggacaccacacacacagcttccctctcttccattagccatccagtcaacaagtcgtgcgcagcgcagtggcaagagctagctaggagattgatccggcctagttctgttcagcatgaggaaggtgtgcgccaacccagacagagaggtcggcctcgacacagtgctcgaggtgcccgtcccggaccagctccaccacgatccgtcgtcgtcgtcgtcgggccacggccggcgccggcgacgcacgctcaaggcgtgggtgcggtcgcgcatggaccagcgccaccggcggcacagctcgccgccttcccaggcggacgtgcagctcatgctcggggtggtcggcgcgccgctggtgccgcagccagtgcaggcgaggaaggccatggtggccggagaggacatcaaggaagagccccttgaggtgtccaaggcgaagtacatcgtggagcagtacgtcgcggcgtctgggggcgagcgggcgctgagcgcggcgacgagcatgtacgcggtggggaaggtgctgatgaggacgaggtcgtcgtcgtcgacgaccaagcaggggcagagagcctgcaggacgggaatggtgggcgtggtccacggcggcgccgagatcgccggcggcctcgtgctgtggcagaaggggccggaggtgtggtgcgtggagatggtggtggccggcggcaccaagatgagcgccgggagcgacggcagagtcgcctggcgccagacaccctggcagcaggcccacgcttcgcgggggcccccgagacctctccgtcgatgcgtccagggtcttaacccgagatcaacggcgaacctgttctcgacagccacgtgggtcggcgagaagagcgtcgacggcgacgactgcttcgtgctccgcgtcgacgccgacccgctggccctgcgcgcccggagcggcggcgacgtcgaggtcgtcaggcacgccgtgtgggggtacttcagccagaggacggggctgctgtcccgcctcgaggacagccacctgctgcgcgtccgcgcgacgaagggctcgccgccggccgagacgaccacgtactgggagacctccatggactcgtccatcggcgactaccgcgccgtggacggcatcaacgtcgcgcacgccggccgcaccgtcgtctcgctgtcccggttcggcggcagcaccaacgacgacggcgctggatccgaatcggccggcgtgctcggcaggaggacgtgcacgtgcatggaggagaattggagcatcgaggaggtcgacttcaacgtcgtgggcctgtccgcggagtgcttcttgcctcctagagacatggtagtagtaccttgcagtcctaaaccagtcgtcgatgagaaggggcagtgtggccgccttgaccacagctgcaagaaagacgacgctcctgctgcacttgacgtcaggaacaagaacggtaatggcggtgccggtggtgtccatcgtcctgcgacggcaagaaaggctcttgtaacggcggcgacagggctaccctggtccgggactgccaaggttgtggctgtcgaaaccttcgacaccaccgccgagtaattagtattattactttgtatatgctgcgtagttacggaggcgtgcgcgtgttttgcgcgccccgtacgtgacgtctggtagctggcaagaacagtacctgtagtttcattttgctctgcatagtgcacagtacgagatatgcgtagaacccatgaacctttttctcctctggagttctactgttttccataacctgcaagaatacatatgctgtacggtaagaattaatgtcaaaaaaaaaaaaaaaaa

SEQ ID NO: 4981 - DNA, 1428 bp, Sorghum bicolor
atgaggaaggtgtgcgccaacctagaccgggaggatggcctcgacacagtgctcgaggtgcctgtccctgagctctacaaggagccatcgtcgtctggccacggccggcgccggcgacgcacggtaaaggcatgggtgtggtcgcgcatggatcagcaccaccgacgatatggcgcgctgccttcccaggccgatgtgcagctaatgctcggcgtgatcggcgcgcctctagtgccgcagcccattgaggctaggaaagccatggccggagaggacatcaaggaggagccccttgaggtgtcgaaggccaagtacatcgtggagcagtacgtcgcggcgtcaggaggcgagccggcactgagcgcggcgacgagcatgtacgctgtggggaaggtactgatgagggcgacaaagggtcagaaagccaagacgggaatgggcgtggtccacggcggtggcgacattgccggtggcttcgtggtgtggcagaagaggccggagatgtggtgcgtggaaatggtagtggccggcggcaccaagatgagcgccgggagcgacggcaaagtcgcctggcgccagacgccctggcagcaggcccacgcttcacggggtcccccgaggcctctccgccgatgcgtgcagggtcttgatccgaaatcaacggcaaacctcttctccacagccacgtgggtgggcgagaagaccatcgacggcgacgactgcttcgtgctccgcgttgacgccgaccccttggctctacgcgcgcggagtagcgccgacgtcgaggtcgtcaggcacgccgtttggggatacttcagccagaggacggggctgctggaccgcctcgaggacagccacctgctgcgcatacgcatgcagggcgcgtcgtccgcccagaccgcgtactgggagacctctatggagtcgtcaatcggcgactaccgcgccgtcaacggcatcaacatcgcgcacgctggccgcaccgttgtgtcgctgtcccgattcggcagcagcgccaacgaccaagacgatggctccgacaccgacgtgcttggcagcaagaggacgtgcacatgcatggaggaaacgtggagcatcgaggaggtcgacttcaacatcatgggcctgtccacggagtgcttcttgcctccgagagacctggtaccttgcagctctaaaccagtggagaaagagcattgcgctggccttgaccacagctgcaagaaagaagacgcggttggtaccgttcctgctacaagtgcggtcgttggtagttgcgacccagctgcagtcgacgtaaagtacaagaacagtgatggcggtgtccgaccgctggccacggcgagaaaggctcttgttccggcgggaacagggctatcctggttcgggactgccaaggttgtggctgtcgacaccgccgccgagtaa

SEQ ID NO: 4982 - DNA, 1698 bp, Sorghum bicolor; identical to SEQ ID NO: 1131

SEQ ID NO: 4983 - DNA, 1700 bp, Zea mays
ccctcgctcgctccgcattgcccgcatcgcctccaatctcagcagaccaggtcgagtttcgcccggattttcagtgtgggaggggagtggaggtgtgacgggagcagcagaggaagcgcgccatggacccgtgcccgttcgtgcgggtgctggtcggcaacctcgcgctcagaatgccggtggcgccgccggccgccggtgctggcgcgggcgtccacccgtccacgtcgccgtgctactgcaagatccggctggggaagatgccggtccagagcgtcccggcgccgctcgtggtctccgacggcggcgagcagacgccggcgtccggggccctcgccgccgcgttccatctgtccaaggctgacctggagtggttcaacgggaagccgtcgctcttctcgtcgcgcggggaagccagcctgaaggtgtcggtctacgctggccggaaggggagtgcctgcggcgtcagctccgggcgcctgcttgggaaggctacgatcgcgctcgacctcaagggcgccgaggccaagcccgccgtgctgcacagcggctggatctccatcgggaagcgatccgggaagggcagcaccgcggcgacggagctcagcctcaccgtccgcgcggagccggacccgcgattcgttttcgagttcgacggcgagccggagtgcagcccgcaggtgctgcaggtgcgcggcagcatgaagcagcccatgttcacctgcaagttcggatgccgcagcaacagcgacctgcgcaggccggggatgcagccggagcgcgacgccgcgtcggccaaggagcgcaaggggtggtcggtgacggtgcacgacctgaagggctccgccgtagcgatggcgtccatggtcacgcctttcgtgccctcgccgggcacggaccgcgtgagccggtccaacccgggcgcgtggctcatcctccgccccgcgggcgacggctcctgggagccctgggcgcggctcgagtgctggcgcgagcgcggcggcgccggcgcgtccgacagcctgggctaccacttcgccctcctggtccccggcgcggaccacgccgtcgccctcgccgactcctccatcccctcgtccaacggcggcaagttcgccatcgacctgacggccgcgcagccgctgagccggggcggcacgccggggtgcagcccgagaggcagcggcgacctgagcaactggcccctggggaactaccgcggcttcgtcatgtccgccgcggtccagggcgagggccggtgcagcaagccgacggtggaggtcggggtggcgcacatcgggtgcgccgaggacgcggcggcgttcgtagccctcgcggcggccgtggacctgagcatggacgcgtgcaggctcttctcccaccggctgaggaaggagctctcgcacctgcaggccgacctactccggtgacccaccgggccggcggcaaccgcgaatcacgagcgaattgtacagaagtagttgaggcagacgtgtgctttgttgtagtagttcgattccggtgatcaactagttgatcgtggtcaccttttcttgtgagcgctgagtgcctttgtgtggtttgatttttttggttggtcgcttcgctttagccatgtagggtgtccgcttttacggatctccgtaatttagagaattttttttttgtgatcgtatgaactatgcttcccagttcttgtt

SEQ ID NO: 4984 - DNA, 1771 bp, Zea mays
acggctccgtcgttctcgttcctcacccgattcttataccaactcgtcccctccttatctccgtcgtcacgcatcgccctcgctcgctccgcattgcccgcatcgcctccaatctcagcagaccaggtcgagtttcgcgcggattttcagtgtgggaggggagtggaggtgtgacgggagcagcagaggaagcgcgccatggacccgtgcccgttcgtgcgggtgctggtcggcaacctcgcgctcagaatgccggtggcgccgccggccgccggtgctggcgcgggcgtccacccgtccacgtcgccgtgctactgcaagatccggctggggaagatgccggtccagagcgtcccggcgccgctcgtggtctccgacggcggcgagcagacgccggcgtccggggccctcgccgccgcgttccatctgtccaaggctgacctggagtggttcaacgggaaascgtcgctcttctcgtcgcgcggggaggccagcctgaaggtgtcggtctacgctggccggaaggggagtgcctgcggcgtcagctccgggcggctgcttgggaaggctacgatcgcgctggacctcaagggcgccgaggccaagcccgccgtgctgcacagcggctggatctccatcgggaagcgatccgggaagggcagcaccgcggcgacggagctcagcctcaccgtccgcgcggagccggacccgcgattcgttttcgagttcgacggcgagccggagtgcagcccgcaggtgctgcaggtgcgcggcagcatgaagcagcccatgttcacctgcaagttcggatgccgcagcaacagcgacctgcgcaggccggggatgcagccggagcgcgacgccgcgtcggccaaggagcgcaaggggtggtcggtgacggtgcacgacctgaagggctccgccgtggcgatggcgtccatggtcacgcccttcgtgccctcgccgggcacggaccgcgtgagccggtccaacccgggcgcgtggctcatcctccgccccgcgggcgacggcgcatgggagccctgggcgcggctcgagtgctggcgcgagcgcggcggcgccggcgcgtccgacagcctgggctaccacttcgccctcctcatccccggcgcggaccacgccgtcgccctcgccgactcctccatcccttcgtccaacggcggcaagttcgccatcgacctgaccgccgcgcagccgctgagccggggcggcacgccggggtgcagcccgagaggcagcggcgacctgagcaactggcccctggggaactaccgcggcttcgtcatgtccgccgcggtccagggcgagggccggtgcagcaagccgacggtggaggtcggggtggcgcacatcgggtgcgccgaggacgcggcggcgttcgtagccctcgcggcggccgtggacctgagcatggacgcgtgcaggctcttctcccaccggctgaggaaggagctctcgcacctgcaggccgacctactccggtgacccaccggaccggcggcaaccgcgaatcacgagcgaattgtacagaagtagttgaggcagacgtgtgctttgttgtagtagttcgattccggtgatcaactagttgatcgtggtcaccttttcttgtgagcgctgaatgcctttgtgtggtgtgattttttggttggttgcttcgctttagccatgtagggtgtccgcttttacggatctccgtaatttataagctgtttggtttgaggaaaaaaaaaataaaaaaaaaaaaaaa

SEQ ID NO: 4985 - DNA, 1733 bp, Zea mays
ctcgctccgcaattccgcatcgcctcctatccttcgcccgccaacctcggcgggtcagggcgtgtttcgcgcgggggctgtggcaggaggaggagcagcagcagcgcgccatggacccgtgcccgttcgtgcgggtgctggtgggcaacctcgcgctcagaatgccggtggcgccgcccgcctccggggccggcgcgggcgtccacccgtccacgtcggcgtgctactgcaagatccggctcgggaagatgccggtccagagcgtcccggcgccgctcgtggtcaccgacggcggcgagcagacgccggcgtccggggcactcgccgccgcgttccacctgtcgaaggctgacctggagtggttcgacgggaagccctcgctcttctcgtcgcggcgcggggcaggggacgctagcctgaaggtgtcggtctacgccggccggaaggggagtgcctgcggcgtcagctccgggcggctgctcgggaaggctacggtcccgctcgacctcaagggcgccgaggccaagcccgccgtgctgcacagcggctggatctccatcgggaagcgggccgggaagggcagcccggcggcggcggcggagctctgcctcaccgtgcgcgcggagccggacccgcggttcgtcttcgagttcgacggcgagccggagtgcagcccgcaggtgctgcaggtgcgcggcagcatgaggcagcccatgttcacatgcaagttcgggtgccgcagcaacagcgacctgcgcaggccggggatgcggcgtgagcgcgacgccaaggagcgcaaggggtggtcggtgacggtgcacgacctgaaggggtcccccgtggcgatggcgtccatggtgacgccgttcgtgccgtcgccgggcacggaccgcgtgagccggtccaacccgggcgcgtggctcatcctccggcccgcggccgacggcgcctgggagccctgggcgcgcctcgagtgctggcgcgaccgccgcggcgccggcgcgtccgacagcctgggctaccgcttcgacctcctcgtccccggcgtggaccacgccgccgtcgccctcgccgactcctccatcccctcgtccaagggcggcaagttcgccatcgacctgaccgccgcgcagccgctcagccggggcggcacgccggggtgcagcccgagaggcagcggcgacctgagcaagtggcccctggggaactaccgcggcttcgtcatgtccgccgcggtccagggcgagggccggtgcagcaagccgacggtggaggtcggggtggcgcacgtcgggtgcgccgaggacgcggcggccttcgtcgccctcgccgcggccgtcgacctgagcatggacgcgtgcaggctcttctcccaccggctgaggaaggagctctcgcacccgcaggccgacctactccggtgacccaccggaccggcggcaacccacgaatcacgagcgaattgtacataggtagttgaggtagatgtgtgctttattagcgtgcgtttgtttgctggagtagttcggttccgctgatcggctagttgatggtggtcgcctttttttttcgtgagcgctgagttcctgagtgcggtgtggtgtgatttttttggctggttgcttcgctttagccatatgtagggtggttcttttttggatctccgtaacttaaggcaatttgtgatcatatggactatgcttccaggttttttgaattcaaaatgaatgagc

SEQ ID NO: 4986 - DNA, 1734 bp, Oryza sativa Japonica Group
gtcttatcccaattctctcttcttcttcctcgcatccatagctaccgatcaggggcagaatttcctgctgattttcttggaggatttgtgattttgaggtcgcatcgcgtcgccatggacccgtgcccgttcgtgcgggtgctggttggcaacctggcgctgagaatgccggtggcgccgccggcggcgggtgcgggggcgggggtccacccgtcgaccgcgccgtgctactgcaagatccggctcgggaggatgccgtggcaggtcgccgcggcgccgctggtggttgccgatggtggggagcaggcgccgtcgggggcgctggccgccgcgttccatctgtccaaggcggatttggagtggttcgcgcggaagccgtcgctgctgttctcgtcgtcgtcgtcgtctcgcgggccggcgacgctgaaggtggcggtgtacgccgggaggaaggggacgacgtgcggtgttagctctgggcggttgattgggaaggctaccattccggtggatctcaagggcgccgaggcgaaggccgcggtggtgcatagcggctggatctgtgttgggaagaagagcggcggcaagggcggctccgcggcggcggagctcagcctcaccgtgcgcgcggagcccgatccgaggttcgtgttcgagttcgacggcgagccggagtgcagcccgcaggtgctgcaggtgaggggaagcatgaagcagccgatgttcacctgcaagttcgggtgccgcagcaacagcgacctgcggagatcggtggttcagacggagcgggacgccgccgccgccgccgggaaggagcggaaggggtggtcggtgacggtgcacgacctgtcggggtcccccgtggcgctggcgtcgatggtgacgccgttcgtggcgtcgccggggacggaccgggtgagccgctccaacccgggcgcgtggctcatcctccgccccgccggcgacgggtcgtgggagccatggggccgcctcgagtgctggcgagagcgcggcggcgcgggcgcctccaacagcctcggctaccgcttcgacctcctcctcccgggcgtcgaccacgccgtccccttggcggagtcctccatcgccgcttccaagggcggcaagttcgccatcgacctcacctcgatgcagccccagagccggggcggcacgccggggtgcagcccgcggggcagcggcgacttcagccagtggccgctcgccagctacagctaccgcggcttcgtgatgtcctcctccgtccagggcgaggggcggtgcagcaagcccacggtggaggtcggcgtcccgcacgtcggctgcgccgaggacgcggccgcgttcgtggcgctcgccgccgcggtcgacctcagcatggacgcgtgcaggctgttctcccacaagctcaggaaggagctctcccacctgcgctccgacgtgctcaggtgaccaccgctcgccgccggtgagcttcccgcggctcacgagcaaaattgtacataagtagttgagactcttttgacacgagatgttctttagttggttcgttggtgtgttagtgttagtagtggtagttcagttttggtgatcagttggttgagttttagatagatctctctctctctcttttatcccctgcgagtgtgcttgtgttcttttggattggctactttacttcaagccaatctcggtaacttcctttcagatgtctataattgggagaaatttgtgacc

SEQ ID NO: 4987 - DNA, 1334 bp, Oryza sativa Japonica Group
atggacccgtgcccgttcgtgcgggtgctggttggcaacctggcgctgagaatgccggtggcgccgccggcggcgggtgcgggggcgggggtccacccgtcgaccgcgccgtgctactgcaagatccggctcgggaggatgccgtggcaggtcgccgcggcgccgctggtggttgccgatggtggggagcaggcgccgtcgggggcgctggccgccgcgttccatctgtccaaggcggatttggagtggttcgcgcggaagccgtcgctgctgttctcgtcgtcgtcgtcgtctcgcgggccggcgacgctgaaggtggcggtgtacgccgggaggaaggggacgacgtgcggtgttagctctgggcggttgattgggaaggctaccattccggtggatctcaagggcgccgaggcgaaggccgcggtggtgcatagcggctggatctgtgttgggaagaagagcggcggcaagggcggctccgcggcggcggagctcagcctcaccgtgcgcgcggagcccgatccgaggttcgtgttcgagttcgacggcgagccggagtgcagcccgcaggtgctgcaggtgaggggaagcatgaagcagccgatgttcacctgcaagttcgggtgccgcagcaacagcgacctgcggagatcggtggttcagacggagcgggacgccgccgccgccgccgggaaggagcggaaggggtggtcggtgacggtgcacgacctgtcggggtcccccgtggcgctggcgtcgatggtgacgccgttcgtggcgtcgccggggacggaccgggtgagccgctccaacccgggcgcgtggctcatcctccgccccgccggcgacgggtcgtgggagccatggggccgcctcgagtgctggcgagagcgcggcggcgcgggcgcctccaacagcctcggctaccgcttcgacctcctcctcccgggcgtcgaccacgccgtccccttggcggagtcctccatcgccgcttccaagggcggcaagttcgccatcgacctcacctcgatgcagccccagagccggggcggcacgccggggtgcagcccgcggggcagcggcgacttcagccagtggccgctcgccagctacagctaccgcggcttcgtgatgtcctcctccgtccagggcgaggggcggtgcagcaagcccacggtggaggtcggcgtcccgcacgtcggctgcgccgaggacgcggccgcgttcgtggcgctcgccgccgcggtcgacctcagcatggacgcgtgcaggctgttctcccacaagctcaggaaggagctctcccacctgcgctccgacgtgctcaggtg

SEQ ID NO: 4988 - DNA, 1636 bp, Hordeum vulgare subsp. vulgare
gagaaggaggatacagaggctagccacggccaagaagaagaagaagaagataacaaggacgaggtggtcgcagtgaaagtggaagcagggccttgagatggacccgtgcccgttcgtacgggtgctggtcggcaacctggccctcaaaatgccggtcgccccgcgccccgccggcgccggcgccggcgtacaccccaccacgtcgccgtgctactgcacgatccggctcaacaagctgccgcttcagagtgccgcggccccgctgctgccctcggacgacatgacgcagggtcccgccgcgacgggcgcactggcagccgcgttccacctttccaaggccgacctcgaccgcgtcacggccaagccgtccctgttcgtcgcccgatccgcgaggctgaaggttgccgtgtacgccgggcggcggggcaccacttgcggggtcaactccggccggctgctcgggaaggtggtcatcccgctggacctaaagaccgcggtggggaagcccatcgtgttccacagcggttgggtccccatcaacaagcgcggccgtaaggcctctgccgtctccggctccgcgcagctcaacctcaccgttcgcgccgagcccgacccgcgcttcgtgttccagttcgacggcgagcccgagtgcagcccgcaagtgctccaggtgcagggcggtatgatgcagcccatgttcacctgcaagttctcctgtcgcagcaacagcgacctccgctctcgatcaatgcactccgatccagggagtggcggccgcaactggctgatgtcgtttggttccgaccgcgagcgcgcagggaaggagcggaagggatggtcggtgacggtgcacgacctgtccggttcgccagtggcactggcgtccatggtcacgccgtttgtggcgtcccccggttccgaccgcgtgagccggtccaacccgggtgcgtggcttgtactccggcccggcgacggcacttggaagccgtggggccgcctggaatgctggcgcgagcgcggcgctggcgcggccggcgacagcctcgggtaccggttcgagctcctgattcctgaccccaccggaatgggcgtcggcgtctctgtcgccgagtccaacgtccctacctcccgcggcgggcgcttcgtgattgacctgacggcggcgcagcccttcgggcggagcgggtcgcctgggtgcagcccgcgcgggagcggtgacttcagcggcgggtacgggctttggcccttcgggagctaccgcgggttcgtgatgtcggcggcagtgcagggcgaagggcggtgcagccggccaacggtggaggtgggggtgccgcacgtcggctgcgcggaggacgcggcggcgttcgtggcgctggcggcagccgtggacctgagcatggacgcgtgcaggctcttctcgcaccgcctccgcagggagctctccagcacccgctccgacccactgcggtgaggagacccaccgagcgccaaaggccaagagatttggcatcgcatgccaccacaaattgtacagcggtagtggcgagatcgagggagttgatggcggtggttctggtctcttgttcttgtttttgtccgtgagagatcaaactgttctttgggatcacttctcgtg

SEQ ID NO: 4989 - DNA, 1833 bp, Oryza sativa Japonica Group
ccacctcccccaccgccatcgccattgccgccgacgaggaagaggagaagcttcgagtggagcgatctcgatggacccgtgcccgttcgtgcgggtgctggtcggcaacctctcgctgaagatgccggtggcgccgcgccccgccggagccggggccggggtgcacccatccacctcgccgtgctactgcaagatccgcctcaacaagctgccgtaccagaccgccgacgcgccgctgctgctgccgccctcgccggaggcatcggcggcgccggcgccagcgccggcgacgggcgcgctcgccgccgcgttccacctctccaaggccgacctcgaccgcctcaccgcgaagccgtcgctgttcgggtcgcgcacggcgaggctgaagatcgtggtgtacgctggccggaggggcaccacgtgcggcgtcggcggcggctccgggaggctgctcgggaaggtggtcatcccgctcgacctcaagggcgcctcggcgaagccggtggtgtaccacagcagctggatctgcatcgggaagcgcgggcgcaagccctcgtcggtgtcggcggcgaacgcgcagctcaacatcacggtgcgcgccgagcccgacccgaggttcgtgttcgagttcgacggcgagccggagtgcagcccgcaggtgctccaggtgcaggggagcatgaagcagcccatgttcacctgcaagttctcctgccgcagcaacagcgacctccgctcccggtcaatgccggccgatatggggagcggcgggcgcaactggctgacggcgttcggctccgacagggagcgggcggggaaggagaggaaggggtggtcggtgacggtgcacgacctgtcaggctccccggtggcgctggcatcaatggtgacgccgttcgtggcgtcgccggggacggacagggtgagcaaatccaacccgggggcgtggctggtgctccgcccgggcgacggcacgtggaagccatggggtcgcctggaatgctggcgcgagcgcggcgcgggcgccgccgccggcgacagcctcgggtaccggttcgagctcgtcctccccgacccaaccggcatgggcgtgggcgtgtccgtggcggagtccaccatcccggcgtcgaagggcggccggttcgcgatcgacctgacggcaacgcaacagttcgggcggagcgggtcgccggcgtgcagcccgtgcgggagcggcgactacgggatgtggccgttcggcagctgccgcgggttcgtgatgtcggcggcggtgcagggggaggggaaatgcagccggccggcggtggaggtgggcgtgcagaacgtcgggtgcgcggaggacgcggcggcgttcgtggcgctcgccgccgccgtcgacctgagcatggacgcgtgccggctcttctcccaccgcctccgccgcgagctctcggcgtcgcgctccgacctgctccggtgaggcacacgaggcggcggtgaatcgatcgatcgatcggaatcgggaacaacattgtacagctagcgctagcgttcgtcgtcgtcgttttctggtctctgtcgtttttgttgggtgatcagattgtgttgtgttttttattttgtttttgaaatcactactcgtgatttttttgtggtttttttgggtggtgaaatggtgatgagggggtttgtaattttggtagacttctaggtgctttttaaagtctagaagcagaggaggaagcagaagaagaagaagagcaagttcgggatcatgatgaatgaatgaacaagttataaaaacttttcgtgtctattatgttttaaatttcaaattcggagtttattttggcc

SEQ ID NO: 4990 - DNA, 2515 bp, Sorghum bicolor
atggagatgaacaagacccggtggtgtcgcgccaccctgctgctgctcctgtcgctggctctccgcggcgcggcgtacctgcaggagcggaagaactacatcgtgcacctccggccgcgggaaggcgccgacggcggctccgtcgaggagtggcaccgctcgttcctgccgcaggcggcggcccggctggactccacggctgacggcggcggcgacgacggcccgcggatcatatactcctacaccgacgtcttcaccggcttcgccgcgcggctcacggacgaggaggcggaggcgctgagggccacggacgggtgcgcgcggctgtacccggaggtgttccttccgctcgccaccacccgctcgccgggcttcctcggcctccacctcggcaacgagggcttctggagcggctccgggttcggtcgcggggtggtgattgggatcctcgacacggggatcctgcccagccacccgtccttcggcgacgacgggctccagccgccgcccaaggggtggaagggcacctgcgagttcaagaacatcgcggggggaggatgcaacaacaagatcatcggggcgcgcgcgttcgggagcgccgccgtgaactcgacggcgccgcccgtcgacgacgccggccacggcacgcatacggccagcacggccgcggggaacttcgtcgagaacgccaacgtcaggggcaacgcggacggcacggcgtccgggatggcgccgcacgcgcacctctccatctacaaggtgtgcacgcgcagccgctgctccatcatggacatcatcgccgggctggacgccgccgtcaaggacggcgtcgacgtgctgtccttctccatcggcgcctactcgggcacgcagttcaactacgaccccatcgccatcgccgccttcaaggccatggagcgcggcatcttcgtcagctgcgccgcgggcaacgccggcccggaccccggaacggtcggcaacggcgcgccgtggatgctcaccgtcgccgcgggcaccatggaccgcgccatacggaccaatgtcaagctcggcaacggcgaggagttccacggcgagtccctcttccagccgcggaacaactccgccgcggacccgctcccgctcgtgtaccccggcgcggacggcttcgacgccagccgcgactgcagcgtgctgcgcggcgccgaggtgaccggcaaggtggtgctctgcgagagcaggggactgagcggccgcatcgaggcggggcagaccgtggcggcgtacggcggcgtgggcatgatcgtcatgaacaaggcggcggaagggtacaccaccttcgccgacgcgcacgtcctcccggcgtcgcacgtcagctacgaggccggggccaagatcatggcctacctcaactccacggcgaacgggacggcgagcatcgacttcaaggggacgatcatcggctcgtacccgtcgccggcggtcactttcttctcgtcccgtgggccgagcaaggcgagcccggggatcctgaagccggacatcacgggccccggcatgaacatcctcgcggcgtgggcgccgagcgactcgcacacggagttctccgacggcggtgccgacctctccttcttcgtcgagtccggtacatccatgtcgacgccgcacctgagcggcatcgcggcgctgctcaagagcctgcacccagactggacaccggccgcgatcaagtcggcgatcatgacgacgtccgacgcggtggaccgcacgggcctgcccatcaaggacgagcagtaccggcacgccaccttctacgccatgggcgcggggtacgtgaacccggcgctggccttcgacccgggcctggtctacgacctccacgccgacgactacatcccgtacctctgcgggctggggctcggcgacgacggcgtcacggagatcgcccaccggcccatcacctgcggcggcgttaaggccatcaccgaggcagagctcaactacccgtccctcgtcgtgaacctgctgtcccagcccatcacggtgaaccgcacggtgaccaacgtggggaaggcgagctccgtgtacaccgccgtggtggacatgcccaaggacgtgtcggtgaccgtgcagccgcccatgctccggttcacggagctgaaggagaagcagagcttcacggtgacggtgcggtgggcggggcagcccaacgtggccggcgccgagggcaacctcaagtgggtctccgacgattacatcgtgaggagccccctcgtgattccacccaagggagagcagcagtaggctcttcttttgtgttgctcgtggtgttcagaacgctaattttgcaaccatggtacagaatatatgtttgtatagcgtctctaggctacggcattgcacggcatgtttgtatgtacaggctacgaaactggggactggagctcttctcgctcgacgtctgctatatcagctgcgattttgttgtgtaaatagcggagatgaataaagctgtgtccttgggatatcataaggg

SEQ ID NO: 4991 - DNA, 2576 bp, Zea mays
aacccacggccacgccccaccctcactccccttctgcccttcgcccgcatacacattgccccgcaagctaccggcgaccgcctagcatctgtggcgccgcgccgcctccgctgatggggatgaacaagtcacggtggtgtcgcgccaccctgctgctgctcctgtcccttgctctccgcggcgcggcgttcctgcaggagaggaagaactacatcgtgcacctccggccccgggaagccaccgacggctccgtcgacgggtggcaccgctcgttcctgcagcaggcggcggcagggctggactccacggccgacgaaggcccgcagatcatatactcctatagcgacgtcttcaccggcttcgccgcgcggctcacggacgaggaggcagaggcgctgagggccacggacgggtgcgtgcggctgtacccggaggtgttcctgccgctcgccaccacccgctcgccgggcttcctcggcctccacctggggaacgagggcttctggagccgctccggattcgggcgcggggtggtgattgggatcctggacacggggatcctgcccagccacccgtccttcggcgacgacgggctccagccgccgcccaaggggtggaaggggacctgcgagttcaagagcatcgccgggggcggatgcaacaacaagatcatcggggcgcgcgcgttcgggagcgcggcggtgaactcgacggcgccgcccgtcgacgacgcgggccacggcacgcacacggccagcacggccgccggcaacttcgtggagaacgccaacatcaggggcaacgcggacggcacggcgtccgggatggcgccgcacgcgcacctctccatctacaaggtgtgcacgcgcagccgctgctccatcatggacatcatcgccgggctggacgccgccgtcaaggacggcgtcgacgtgctgtccttctccatcggcgcctactcgggcacgcagttcaactacgaccccatcgccatcgcggcgttcaaggccacggagcgaggcatcttcgtcagctgcgccgcgggcaacgcggggccagagcccggcacggtcggcaacggcgcgccgtggatgctcaccgtcgcggcgggcaccatggaccgcgcgatacggaccaatgtcaagctcggcaacggcgaggagttccacggcgagtccctgttccagccgaggaacaactccgccgcggacccggtcccgctggtgtaccccggcgcggacggcttcgacgcgagccgcgactgcagcgtgctgcgcggcgccgaggtggctggcaaggtggtgctgtgcgagagcaggggcctgagcgaccgcgtcgaggcgggccagaccgtggcggcgtacggcggcgtgggcatgatcgtcatgaacaaggaggcggaggggtacaccaccttcgccgacgcgcacgtcctcccggcttcgcacgtcagctacgagtccgggtccaagatcctggcctacttgaactccacggccaacgggacggcgagcatcgacttcaaggggacgattatcggctcgtacccgtcgccggcggtcaccttcttctcgtcccgcgggccgagcaaggcgagcccggggatcctgaagccggacatcacggggcccggaatgaacatcctcgcggcgtgggcgccgagcgactcgcacacggagttctccgacggcggggccgacctgtccttcttcgtcgagtccgggacgtccatgtcgacgccgcacctgagcggcgtcgccgcgctcctcaagagcctgcacccggactggtcgcccgcggcgatcaagtcggcgatgatgacgacgtccgacgcggtggaccgcacggggctgcccatcaaggacgagcagtaccggcacgccaccttctacgccctgggcgcgggctacgtgaacccggcgctcgcattcgacccgggcctggtctacgacctccgcgccgacgactacatcccctacctctgcgggctggggctgggcgacgacggcgtcacggagatcgcccaccgccccgtcgcctgcggcggcctcagggccgtcaccgaagccgagctgaactacccgtccctcatcgtcaacctgctggcccagcccatcgcggtgaaccgcacggtgaccaacgtggggaaggcgagctccgtgtacaccgcggtggtggacatgcccaaggacgtgtcggtgaccgtgcagccgccgacgctccggttcacggcgctggacgagaagcagagcttcacggtgacggtgcggtgggccggccagcccaacgtcgccggcgccgagggcaacctcaagtgggtctccgacgactacatcgtgaggagccccctcgtgattccagccaagggagagtagcgcggagcagcggcctggcggcaacgctctttgtgctgctcggggtcggggttgaagaaggctaattttgcgaccatggtacagagtatgtctgtatagcgtctctaggctacggcacttgcacaccgcatgtttgtataggctacgaaactatggagtatgaactggagttcttctcgctcggaaaaaaaaaaaaaaaaa

SEQ ID NO: 4992 - DNA, 2541 bp, Oryza sativa Japonica Group
attgtattgtacacacgatggagtggtcgtcgatgcggtggtggtgcctcgccgtggtgctcctcctgtccacgccgctgctcgccgcgggttacctgcaggagaggaagaactacatcgtgcacctcgagccgagggacgaggccgccgccgccgctggcgacgcctccgtcgaggagtggcaccgctcgttcctgccgcaggtggccaagctcgattccgactccgacggcgccgacggaggcccgcgcattgtgtactcctacagcgacgtgttcaccgggttcgccgcgcggctcacggacgaggaggccgaggcggtgagggccacggcggggtgcctcaggctgtaccccgaggagttcctgccgctggcgacgacgcgctcgccggggttccttgggctccacctcgggaacgaggcgttctggagccactcggggtttggccgcggcgtcgtgattgggatcttggacaccgggatcctgcccagccacccgtcgttcggcgacgacggcctccagccgccgcccaagaactggaagggcacgtgtgagttcaaggcgatcgccggcggcggatgcaacaacaagatcatcggcgcccgcgcgttcgggagcgccgcggtgaactcgtcggcgccgccggtggacgacgcggggcacggcacgcacacggccagcacggccgcgggcaacttcgtggagaacgccaatgtccggggcaacgccgacggcacggcctccgggatggcgccgcacgcgcacctcgcgatatacaaggtgtgcacccgcagccgctgctccatcatggacatcatcgccgggctggacgccgccgtgaaggacggcgtcgacgtgctgtcattctccatcggcgcgtcctccggcacgcagttcaactacgaccccatcgccatcgccgggttcaaggccatggagcgtggcatcgtcgtcagctgcgccgcgggcaactccggcccggaccccggcacggtcggcaacggcgcgccgtggatgctcaccgtcgcggccggcaccatggaccgcgcgatacgcaccaccgtgaggctcggtaacggcgacgaattcgacggcgagtcactgttccagccggggaacaactccgccgcgaacccgctcccgctcgtgtaccccggcgcagacggctccgacacaagccgcgactgcagcgtgctccgcgacgccgaggtgaccggcaaggtggtgctctgcgagagcagaggcctgaacggccgcatcgaggccggccagaccgtggcggcgtacggcggcgccggcatcatcgtgatgaacagagcagccgaggggtacaccaccttcgccgacgcgcacgtgctcccggcgtcgcacgtcagcttcgacgccgggaccaaaatcgcggcgtacgtgaactccacggacaacccgacggcgagcatcgcgttcaaggggacggtgattggctcgtccccgtcgccggccgtcaccttcttctcgtcgcgtgggccaagcaaggccagcccgggcatcctgaagccggacatcaccgggcccggcatgaacatcctcgccgcgtgggcgccgagcgagtcgcacacggagttctccgacggcgtcggcctctccttcttcgtcgagtccggcacgtccatgtcgacgcctcacctgagcggcattgccgctctcctcaagagcctccacccggactggtcccccgcggcgatcaagtcggcgatcatgacgacgtcggacgccgtggaccgcaccggcgtccccatcaaggacgagcaataccgccacgccaccttctacgccatgggcgccggctacgtcaacccggcgctcgcgttcgaccccggcctagtctacgacctccacgccgacgactacatcccctacctctgcgggctggggatcggagacgacggcgtgaaggagatagcccaccggccggtcacctgctccgacgtcaagaccatcaccgaggcagagctcaactacccatccctcgtcgtcaacctgctcgcgcagccgatcacggtgaaccggacggtgaccaacgtcgggaagcccagttccgtgtacacggccgtcgtcgacatgcccaaggacgtgtccgtgatcgtgcagccgccgatgcttcggttcacggagctgaaggagatgcagagcttcaccgtgacggtgcggtgggccggccagccgaacgtcgccggcgccgagggcaacctgaagtgggtctcggacgaacacatcgtgaggagccccatcatcatcccagccacggccgcgtagtaattttttgcaacttcagcatgtacagtatgtcagtaaatagctaagatcaataaagatccatcaccttggtttgacctgtgttctgttggtcaagatgtgaagaatgtagcactccttgactagttggccgatcctgtcaactttgacagctactactggagtactactaattaatttccatcttattcatcagaaactatacatcagagattatcattaatagatgagtcaatgctcattc

SEQ ID NO: 4993 - DNA, 2604 bp, Oryza sativa Japonica Group
acgccactcccccctccccaccaccattgttcaaatcatatcagctccagtttttactcacaagtcgcaagtgagagccactgagccagcatccaaccagtgtacatcatgaggactcaacgaatcctcctcgccgtagtagtgtccatggttgtttcctcagcgatgctggccgttgtctcctgcgcgcgggagaggaagaactacgtggttcatctcgacccgagggaggacggcggcgtcgccgactcggtcgagctgtggcaccgctcgttcttgccggaggccacgccggaggcggcgggggatgatggcccgaggatcatttactcgtacagccacgtgctgtccgggttcgccgcgcagctcaccgacgacgaggctgaggcgatgaggaagaaggaggggtgcatcagactgtaccccgaggagttcttgccgttggcgaccacccattcgccggggttccttgggcttcacctcggcaatgatgggttctggagccgctccgggttcggccggggcgtggtgattgggctcctggacaccggtattttgcccagccacccgtcgttcggcgacgccgggatgccgccgccgcccaagaagtggaagggcacctgcgagttcaaggccatctccggcggcggatgcaacaacaagatcatcggcgcgcgcgccttcggcagcgccgcggtcaatgcgacggcgccgccggtggacgacgcggggcacggcacgcatacggcgagcacggccgcgggcaacttcgtcgagaatgccgacgtccgcggcaacgcccatggcacggcgtccgggatggcgccgcacgcgcacctggccatatacaaggtgtgcaccaggagccggtgctccatcatggacatcatcgccgggctggacgccgccgtcaaggacggcgtcgacgtgctctcgttctccatcggcgcgtcccccggtgcgccgttcaactacgacctcgtcgccatcgccacgttcaaggccatggagcatggcatctttgtcagctccgccgctggcaatgatggcccagtcgccgccaccgtgggcaacggcgcgccatggatgctcacggtcgcggccggcaccatggaccgggcgatacgcaccacggtgacgctcggcaacggccaggtgttcgacggcgagtccctgtaccagccgcggaacaacaccgccgggcgccagctcccgctggtgttcccgggcctgaacggcgactccgactcacgagactgcagcacgctggtcgaagaggaggtgagcggcaaggtggtgctctgcgagagccgcagcattgtcgagcacgtcgagcagggacagaccgtgtccgcgtacggcggcgccggcatgatcctgatgaacaagccggtcgaaggatacaccacattcgccgacgcgcacgtgctgccggcgtcgcatgtgagctacgccgccgggtcaaagatcctgtcctacatcaagtccactcccaagccgacggcgagcgtcacattcaaggggacggtgatggggtcgtcgccggcgccgtccgtcgcgttcttctcgtcccgggggccgaacaaggccagcccgggcgttctgaagcctgacatcaccgggcccggcatgaacatcctcgccgcgtgggcccctggcgagatgcacaccgagttcgccgacggcgtcagcctctccttcttcatggagtccggcacgtcgatgtccaccccgcacctgagcggcatcgccgccatcatcaagagccttcacccgacatggtccccggcggcgatcaagtcggcgatcatgacgtcgtccgacgtcgccgaccacgacggcgtgccgatcaaggacgagcagtaccgcagcgcgagcttctacaccatgggcgccggctacgtcaacccgtcccgcgccgtcgacccgggcctcgtctacgacctccacaccaacgactacatcgcctacctctgcggcctcggcatcggcgacgacggcgtgaaggagataacccaccgccgcgtctcctgcgccaagctcaaggccatcaccgaggcggagctcaactacccgtcgctggtggtgaagctgctgtcccagccgatcaccgtccaccgcatcgtgaccaacgtcgggaaggccaactccgtgtacaccgccgtggtggacatgcccaagaacgtcgcggtcaccgtgcacccgccattgctgcgcttctccagggcgtacgagaagcagagcttcacggtgaccgtgcggtgggcagggcagccggccgtcgccggcgtcgaggggaacctcaagtgggtctccgacgagcacgtcgtgaggagcccgatcgtgataccgccagcgaaggccgtcgtgtagtggatcgaattgagcagcaaaatcagcagcttctctgctcgtgttcgacgagagtagaatgcactcagagtacgtgtccggtgtacgtaacgtatggcgacgtaggcgtattacggatcgatttgttgtatagggctaccgatcgttgtaacggcagcaagctcagctgcaacggagttgtgtaaatactggaaaaataatggatttttagtctgtaagatgactcgatcg

SEQ ID NO: 4994 - DNA, 2734 bp, Sorghum bicolor
acgccacttcactcctccctcgcttcaaatcgattcggcgctagcgagcgccgagcagcaacgccaaggcggcggcagcagcatccagcaacagcagccgctacctccctttgtctagttgtcttcctcctccggtccactcctgcttgctagagtgcctagcctcatgaggaccccaaggagcctccttcccctcctcctcgtcctgctgtccgccgccgcgctgctcaccgtcgccgattcgcaggagcgcaagaactacgtggttcatctcgagccaagggacgacgccggcggcgacagcgccggttcgctggaggagtggcaccggtccttcttgccggaggccacgctggactcggcggcggatgacggcccgaggatcatccactcgtacagccacgtgctgacggggttcgccgcccgcctcaccgacgcggaggcggaggcgctgaggagcaaggaggggtgtctgcggctctaccccgaggagttcctgccgctggcgaccacccactcgccgggcttcctcggcctccacatgggcaaggacggcttctggagccgctccgggttcggccgcggcgtagtgattgggctcctcgacaccggcatcctgcccagccacccgtccttcaacgacgccgggctgccgccgccgcccaagaagtggaagggcacctgccagttcaggtcgatcgccggcggcgggtgcagcaacaaggttattggcgcgcgcgcgttcgggagcgcggccatcaacaacacggcgccgcccgtggacgacgccggccacggcacgcacacggccagcacggcggcgggcaacttcgtgcagaacgccgacgtgcgcggcaacgcgcacggcacggcgtccgggatggcgccgcacgcgcacctggccatctacaaggtgtgcacgcggagccggtgttccatcatggacatcgtcgccgggctggatgccgccgtcaaggacggcgtggacgtgctctccttctccatcagcgccacggacggcgcgcagttcaactacgacctcattgccatcgccacgttcaaggccatggagcacggcatcttcgtcagcgctgcggccggcaacgacggccccaccgcgggatccatcaccaacggcgcgccgtggatgctgacggtcgcggcgggcaccatggaccgcgcgatacgcactaccgtcaggctcggcaacgggcaggagttcgacggcgagtcgctgttccagccccggaacaacaccgcggggcgcccgctgccgctcgtcttccccggccgcaacggcgacccggaggcccgcgactgcagcacgctggtggagaccgaggtgaggggcaaggtggtgctgtgcgagagccgctccatcaccgagcacgtcgagcaggggcagatggtgtccgcgtacggcggcgccggcatgatcctgatgaacaaggcggcggaggggtacaccaccttcgccgacgcgcacgtgctgccggcgtcgcacgtgagctacgccgcggggtccaagatcgcggcgtacgtcaagtcgacgcccaagcccacggcgaccatcacgttccggggcacggtgatgagctcgtccccggcaccgtccgtggccttcttctcgtcgcgcgggccgaacaaggcgagcccgggcatcctgaagccggacatcaccggtcccggcatgaacatcctggcggcgtgggcgcccagcgagatgcacccgcagttcgcggacgacgtgagcctgaccttcttcatggagtccgggacgtcgatgtcgacgccgcacctgagcggcatcgcggccatcatcaagagcctgcacccgagctggtcccccgccgcgatcaagtcggcgatcatgacgtcgtcgaacacggcggaccacacgggcgtgccgatcaaggacgagcagtaccggcgggcgagcttctacggcatgggcgccgggtacgtgaacccgtcccgcgccgtcgacccggggctggtgtacgacctcagcgccggcgagtacgtcgcctacctctgtggtctgggcctcggggacgacggcgtgaaggagataacggggcgccgcatcgcctgcgccaagctgaaggccatcaccgaggcggagctcaactacccgtcgctggtggtgaagctgctgtcccatccgatcaccgtccgccgcaccgtgaccaatgtcgggaaggccaactcggtgtacaaggccgtggtggacatgcccaagggcgtgtccgtggtggtgcggcccccgatgctgcggttcaccaaggtgaacgagaagcagagcttcaccgtgacggtgcggtggaacgggccgccggccgtgggcggcgccgaggggaacctgaagtgggtgtcgagcgagcacgaggtccggagcccgatcgtgataccgccggccaaggccgccgcgtaggcgtagctccccaattcaatctgcttaacggccggcatgaccgtgctcgtgtcgtgtcgtgtcgtgtctccagggaagaaggtcatgagtacttcagtagcggtaggtaatcatgagtgtgccccgtgtacgtatggcgaaggaagtaggcatcatgcggctgttgtataggcaggcagggtacccgatcatcatctgtgaagcagcaagctcagctgcagtggcaatggcaatggcaatgtcgcgttcgttctgtatgtaaaaaaatggcggaaataattaatcgtttcgaaaaccccc

SEQ ID NO: 4995 - DNA, 2692 bp, Hordeum vulgare subsp. vulgare
gacgacacgaccacgcccactccactccactcctctccccccctcctccagctgccgcccacccaaaccaaaatcggctccacctccgcagcagacagtagactgtacctcggcacgccatccatccacccacccggccggctcgcgtgcgtgctatgagcatgaggagcctcgtggccgccgtgttccccctcctcctcgcgcagctgctgctgggcgcgtgccatgggcagcaggatgggcggaagaactacgtggtgcacctcgagccgagggaggacgaggatgggggcgccgctctcccggtcgaggaatggcaccgctccttcctgccggtggccgcccccagctcggccggcgacggcgccggcgccgggccgaggatcatctactcctacagccacgtgctgaccgggttcgcggcgcggctcagcgacgcggaggcggacgcgctgcggcgcagggacggctgcatccggctctaccccgaggagttcctgccgctggccaccacccactcgccgggcttcttgggtctgcatctcggcaaggatggcttctggagccggtctgggtttggtaagggcgtcgtgattgggctcctcgacaccggcatcctgcctagccacccctcctttggtgacgccggcatgccgccgccgcccaagaagtggaagggcgcgtgcgagttcaaggcgattgccggggcgggcggatgcaacaacaaggtcatcggcgcgcgcgcgttcggcagcgccgccgtcaacgacacggcgccccccgtcgacgacgccggccacggcacgcacacggccagtacggccgcggggaacttcgtggagaacgccgatgtccgtggcaatgcgcacgggacggcgtccgggatggcgccgcacgcgcacctggccgtgtacaaggtgtgctcgcgcagccggtgctccatcatggacgtcattgccgggctcgacgccgccgtcaaggacggcgtcgacgtcatctccatgtccatcgacgtctcggacggcgcgcagttcaactacgacctcgtcgccgtcgccacgtacaaggccatcgagcgtggcatcttcgtcagcgccgccgccggcaatgccgggccgactgcaggcagcgtctccaactgcgcgccgtggatgctcacggtcgccgccggcaccacggatcgcgcgatacgcacgacggtgaagctcggcaacggccaggagttcgacggcgagtccctgttccagccccacaacaactccgccgggcggccggtcccgctcgtgttcccaggcgccagcggcgacccggacgcccgcggctgcagctccctccccgactcggtgagcggcaaggtggtgctctgcgagagccgcggcttcacgcagcacgtcgagcagggccagaccgtgaaggcgtacagcggcgccggcatgatcctgatgaacaagccggaggaggggtacaccaccttcgccaacgcgcacgtcctgccggcgtcgcacgtcagcaacgccgccggctcaaagatcaccgcctacttcaagtccacgcccaaccccacggcgagcatcacgttcaaggggacggtgctgggcatctcccccgccccgacggtggccttcttctcctcccgcgggccgagcaaggccagcccgggcatcctgaagccggacatcagcgggccggggatgaacatcctcgccgcgtgggcgccgagcgagatgcacccggagttcatcgacgacgtgagcctggccttcttcatggagtccggcacgtccatgtccaccccgcacctgagcggcatcgccgcggtcatcaagagcctgcacccgagctggtcccctgcggcaatcaagtcggcgctcatgacctcctcggacatcgcggaccacgccggcgtgccggtgaaggacgagcagtaccgccgggcgagcttcttcaccatgggcgccgggtacgtgaacccgtcgcgcgccgtggacccgggcctggtctacgacctgtcgcccaacgactacatcccgtacctgtgcgggctgggctacggggacgacggcgtgaaggagatcgtgcaccgccgcgtggactgcgccaagctgaagcccatcaccgaggcggagctcaactacccgtcgctggtggtgaagctgctgtcgcagccgatcaccgtccgccgcaccgtgaagaacgtgggcaaggccgactcggtgtacacggccgtggtggacatgcccaaggaggtgtcggtcacggtgcgcccgccgatgctgcggttcaccaaggtgaacgagcggcagagcttcacggtgacggtgcggtgggccgggaagcagccggccgtcgccggcgccgaggggaacctcaagtgggtctcccccgagcacgtcgtgcggagccccatcgtggtgccgccggccaaggtggtcgcgtagggcgctcggtcgggttcgtcgtcttcgtcatcggtagaaaaaagttctcggcggcgtacctcgtaggcgtgcgtgacagagagtaagaacattgcgttattgtatagggtggcgcggtcgattaggcgcgtgcgtgcgtactgggtcgagcgccgccattgctgacggcgcagcaagctcggctgcgacgccggcgatggtggtgggtgtatagtgcaaataatggaattcaatttaaccctcggaagtgtagc

SEQ ID NO: 4996 - DNA, 2611 bp, Zea mays
cactccctcctcctgcaccctgcgcttcaaatcgtttcggcggtagcgagcaccgagcaagcatccagcaacagcagccgctacctccctttgtctagctgtctccctcacccggtccagtcctgcattgcctcatgaggacccaaagaaacctccttcccctcctcctgctgctgtccgccgcgctgctcgccgtcgccgacgcccaggagcgcaagaactacgtggttcacctcgagccgagggacggcggcgggtcggtggaggagtggcaccggtctttcttgccggaggccacgctggactcggcggcggatgacgggcccaggatcatccactcgtacagccacgtgctgacggggttcgccgccagcctcaccgacgcggaggcggagacgctgaggcgcaaggaggggtgcctgcggctgtacccggaggagttcctgccgctggctaccacccactccccgggcttcctcggcctccacatgggcaagcacggcttctggggccggtccgggttcggccgcggcgtcgtgattgggctcctcgacaccggcatcctgcccacccacccgtccttcggcgacgcggggatgccgccgccgcccaagaagtggaagggcgcctgccagttcaggtccgtcgccggcggcgggtgcagcaacaaggtcatcggcgcgcgcgcgttcgggagcgcggccatcaacgacacggcgccgcccgtcgacgacgcgggccacggcacgcacacggccagcaccgcggcgggcaacttcgtgcagaacgccggcgtgcggggcaacgcgcacggcagggcgtccgggatggcgccgcacgcgcacctggccatctacaaggtgtgcacgcggagccggtgctccatcttggacatcgtcgccggcctggacgccgccgtcagggacggcgtggacgtgctctccttctccatcggcgccaccgacggcgcgcagttcaactacgacctcatcgccatcgccacgttcaaggccatggagcgcggcatcttcgtcagcgccgcggccggcaacgacggccccgccgcggggtccatcaccaacggcgcgccgtggatgctcacggtcgcggcgggcaccaccgaccgcgcgatacgcaccaccgtgaggctcggcaacgggcaggagttccacggggagtcgctgttccagccccggaacaacaccgcggggcgcccgctgccgctcgtcttcccggaggcccgcgactgcagcgcgctggtggaggccgaggtgaggggcaaggtggtgctgtgcgagagccgctccatcagcgagcacgtcgagcaggggcagacggtggccgcgtacggcggcgccggcatggtcctgatgaacaaggcggcggaggggtacaccaccttcgccgacgcgcacgtgctggccgcgtcgcacgtgagccacgccgcggggtcgaggatcgcggcgtacgccaggtcggcgcccagtcccacggcgtccatcgcgttccggggcacggtgatggggtcgtccccggcgccgtccgtggccttcttctcgtcgcgcgggcccaacagggcgagcccgggcatcctgaagccggacatcacggggcccggcatgaacatcctggcggcgtgggcgcccagcgagatgcacccggagttcgcggacgacgtgagcctgcccttcttcgtggagtccgggacgtccatgtcgacgccgcacctgagcggcatcgcggccgtcatcaagagcctgcacccgagctggtcccccgcggcggtgaagtcggcgatcatgacgtcgtcggacgcggcggaccacgcgggcgtgcccatcaaggacgagcagtaccggcgggcgagcttctacagcatgggcgccgggtacgtgaacccgtcccgcgccgtggacccggggctggtgtacgacctcggcgccggcgactacgtcgcctacctctgcggcctgggcatcggggacggcggcgtgaaggagataacggggcgccgcgtcgcctgcggcggcaagcggctgaagcccatcaccgaggcggagctcaactacccgtcgctggtggtgaagctgctgtcccgcccggtcaccgtccgccgcaccgtgaccaatgtcgggaaggccagctccatgtacagggccgtggtggacatgcccagcagggccgtgtccgtggtggtgcggcccccgacgctgcggttcgacagggtgaacgagaagcggagcttcaccgtgacggtgcggtggagcgggccgccggccgccggcggcgtcgagggcaacctgaagtgggtgtcgagggatcacgtagtccgcagcccgatcgtgataccgccggcgaaggccaccgcgtaggcgtagcttccagcccaattgatgagtctgctagacgggcggcattggtcgtgctcggcatgtatccctccagcaaggtcagtagcggtaggtggtagtcttgagggtgacccgtgtacgtatggcgaaggaagtaggcaggcgactgttgtataggcaggcagaggcagggtaacccatcatctgtgacgcagcaagctcagctgcaatggcaatggcaatggcgcgttggttcctgt

SEQ ID NO: 4997 - DNA, 2660 bp, Zea mays
cgccactccactccactgccctcctcctgcaccctgcgcttcaaatcgtttcggcggtagtgagcaacgccaagcatccagcaacagcagccgctacctccctttgtctagctgtctccctcacccggtccagtcctgcattgcattgcctcatgaggacccaaagaaacctccttcccctcctcctgctgctgtccgccgcgctgctcgccgtcgccgacgcgcaggagcgcaagaactacgtggttcatctcgagccgagggacgacgacggcggcggcgggtcggtggaggagtggcaccggtctttcttgccggaggccacgctggactcggcggcggatgacgggcccaggatcatccactcgtacagccacgtgctgacggggttcgccgccagcctcactgacgcggaggcgcagacgctgaggcgcaaggaggggtgcttgcggctgtacccggaggagttcctgccgctggctaccacccactcgccgggcttcctcggcctccacatgggcaagcacggcttctggggccgatccgggttcggccgcggcgtcgtgattgggctcctcgacaccggcatcctgcccacccacccgtccttcggcgacgcggggatgccaccgccgcccaagaagtggaagggcgcctgccagttcaggtccgtcgcccgcggcgggtgcagcaacaaggtcatcggcgcgcgcgcgttcgggagcgcggccatcaacgacacggcgccgcccgtcgacgacgcgggccacggcacgcacacggccagcaccgcggcgggcaacttcgtgcagaacgccggcgtgcggggcaacgcgcacggcagggcgtccgggatggcgccgcacgcgcacctggccatctacaaggtgtgcacgcggagccggtgctccatcttggacatcgtcgccggcctggacgccgccgtcagggacggcgtggacgtgctctccttctccatcggcgccaccgacggcgcgcagttcaactacgacctcatcgccatcgccacgttcaaggccatggagcgcggcatcttcgtcagcgccgcggccggcaacgacggccccgccgcggggtccatcaccaacggcgcgccgtggatgctcacggtcgcggcgggcaccaccgaccgcgcgatacgcaccaccgtgaggctcggcaacgggcaggagttccacggcgagtcgctgttccagccccggaacaacaccgcggggcgcccgctgccgctcgtcttcccggaggcccgcgactgcagcgcgctggtggaggccgaggtgaggggcaaggtggtgctgtgcgagagccgctccatcagcgagcacgtcgagcaggggcagacggtggccgcgtacggcggcgccggcatggtcctgatgaacaaggcggcggaggggtacaccaccttcgccgacgcgcacgtgctggccgcgtcgcacgtgagccacgccgcggggtcgaggatcgcggcgtacgccaggtcggcgcccaggcccacggcgtccatcgcgttccggggcacggtgatggggtcgtccccggcgccgtccgtggccttcttctcgtcgcgcgggcccaacagggcgagcccgggcatcctgaagccggacatcacggggcccggcatgaacatcctggcggcgtgggcgcccagcgagatgcacccggagttcgcggacgacgtgagcctgcccttcttcgtggagtccgggacgtccatgtcgacgccgcacctgagcggcatcgcggccgtcatcaagagcctgcacccgagctggtcccccgcggcggtgaagtcggcgatcatgacgtcgtcggacgcggcggaccacgcgggcgtgcccatcaaggacgagcagtaccggcgggcgagcttctacagcatgggcgccgggtacgtgaacccgtcccgcgccgtggacccggggctggtgtacgacctcggcgccggcgactacgtcgcctacctctgcggcctgggcatcggggacggcggcgtgaaggagataacggggcgccgcgtcgcctgcggcggcaagcggctgaaggccatcaccgaggcggagctcaactacccgtcgctggtggtgaagctgctgtcccgcccggtcaccgtccgccgcaccgtgaccaatgtcgggaaggccagctccgtgtacagggccgtggtggacatgcccagcagggccgtgtccgtggtggtgcggcccccgacgctgcggttcgacagggtgaacgagaagcggagcttcaccgtgacggtgcggtggagcgggccgccggccgccggcggcgtcgagggcaacctgaagtgggtgtcgagggatcacgttgtccgcagcccgatcgtgataccgccggcgaaggccgccgcgtaggcgtagctcccagcccaattgatgagtgccccggcattggtcggcaaacggcatgtatccctccctccaacaaggtcagtagcggtagccggtaggtggtaatcttgagtcagtgtgaccggtgtacgtatggcgaaggaagtaggcaggcgactgttgtataggcaggcagaggcagggtaacccatcatctgtgacgcagcaagctcagctgcaatggcaatggcaatggcgcgttggttccaaaaaaaaaaaaaaaaa

SEQ ID NO: 4998 - DNA, 2415 bp, Sorghum bicolor; identical to SEQ ID NO: 1132

SEQ ID NO: 4999 - DNA, 2305 bp, Zea mays
cgctccctgagttagagctgtcgcaacgaagagaaataactcacacaaaaaacacaagggagcctcccgatcatctcggtggcgatctcgaataagatccggtgctgctccatgatttgaatctctcggactgatcatgacaggaatgccccctgcagtctgcagctgattgcaggggacgtctgctgcctacagctctcggtctcggatgccatagaagagttggtccccatggactgcggacaccacggcgttgttccacggcctgaacaccaggcgccgcccaattgctgcgccaccgaggtcccgcagagcccgacgctctcttccgaagaattcctccagttcaagaggaaggccaccacgatcgtggaggagtacttctccacggacgacgtcgccgcgacggcgaacgagctgcgggagctccgcgtgccgtgctaccacttctacttcgtcaagaagctggtctccgtggcaatggaccgccacgacagggagaaggagaaggcggcggtcctgctgtcctcgctctacggcgacgtcgtcgaccgcccgcagctctgcaaggccttctgcaagctcaccgagtcctgcgacgacctgtccgtcgacacgcccgacgccgtcgacatcctcgccgtgttcgtcgcccgcgccgtcgtcgacgacatgctgccgccggcgttcctggccacgcagagcgcgcgcctgccccacgggtgcaagggcgccaaggtcctccgcagggcggagaagagctacctgtccgtgccgcaccacggcgagatcgtcctgcagaggtggggcggcagcaagcggatcacggtggaggaggccaaggccaagatatccgacatcctggaggagtacctcgccggcggcgataggagcgaggccctgcggtgcgtcagggacctcaagatccccttcttccaccacgacgtcgtcaagcgcgcgctcgtcctcgccgtggagcgcggccgtgcggccgagggcctcatcctggacctcctcaagtcggcgtcggaggaaggcgttatcaacgagagccagatcactaaagggtttgaccgtctgatcgactctctagacgatctggcgctcgacgtgccgaacgcgaggtgccttctgaaatcggtgatccataaggcttcgtcggagggctggctgtccgagtcgtgcctcaaaccgttgccaccggagccgaagaagggtagcgaggtcgacgacgccacggtgcggcagttcaaggagaaggccgttttgatcataaaggagtacttcttgaccggcgacatcatcgaggtcatgagctggttggaagcagagaactactcgtgttgtccctccttcaatgccatcttcgtgcagaagctggtgaacgccgcgatggaccggaagagccgcgagaaggaaatggcgtcggtgctgctctcctcgctctgcatgccgccagaggacgtcgtggcagggttccacctcctcatcgacgccgccgaggacgccgcgctggacaacccggccatagtcgaggacctgaccatgttctttgctaggtccgtggttgacgaggtgatcgcaccgtcggacctggaggcattggaggaggacgccggccgcgtcaaggcggatggctccgccggcatgctggcgcttcggaacgcccatgcgctgctcggcgcgaagctctccgcggagcggatcttgcggtgctggggcggcggcggcagcggcaaggcaggctgggagctggacgaggtgaaggacaagatcggcaagctgctgcaggagtacgactgcggcggcgacatccgggaggcgtgccgatgcatcaaggatcttgccatgcccttcttccaccacgaggtggtgaagaaggcgctggtggctatcatcgagaagcgaggcagggacgagcggctctggggcctcctcagcgagtgctacggtcgcggtctgatcacgccgaaccagatgaccaagggcttcgacaggatggccgactgcgtcgacgacctcgcactcgacgtgcctgacgccgcgaagcagctcggctgctgcatcgagcgcgccaagaaggatggatggcttgacccgtccttctcgatgacgacgccagggctgcctgttgcaaatggcgtttgttcgtgagcaatcggtcacattcagggtgcagcaccgcaattccatttcctggggagttcgtctgcaacttttagtacttttacacatcacactatatatacttgtactatgaatcaacaggggcaagagagagggaatatacaaatataatcgccac

SEQ ID NO: 5000 - DNA, 2587 bp, Oryza sativa Japonica Group
acagctctctctcaatcgctccctgagctagagctgtccctgccaaaggcaaataataccagatgaacacggcagcctctcgatctcgacaactcggggcggaataattctggtgttcttctcatcaccgatcgtttctgtacatgtaacaagttgaggatcgtggcgcctgcatgcatttggtggacgccacgtcaagaataaccgaggttacaggtgtctccccctgcatgcagcagggggcatctgcagcttgcggaactcggatggtttgagtttgaacgagttgcagcatgtcccccatggagtcccgtcctgatgatcttgttcctcccgcgatgcacaagccggcgatccaatgcgccgccgccgaggacgcgagcctgctgcgaagcccgacggtgtcgtcggaggagttcatgcagttcaagaggaaagccacgacgatcttggaggagtacttctccacggacgacgtcgcggcgacggcgaacgagctgagggagctgcgcgtgccgtgctaccactactacttcgtcaagaagctggtctcggtggccatggaccgccacgacagggagaaggagatggcggccgtgctgctgtcctcgctgtacggcgacgtcatcgaccggccgcaggtgtacaaggggttcggcaagctcgccgagtcctgcgacgacctgtccgtcgacacgcccgacgccgtcgacatcctcgccgtgttcgtcgcccgcgccatcatcgacgacatactcccgccggcgttcctggccaagcagctgacgtgcctgccggagggatgcaagggcgccgaggttcttcacagggcggagaaaagctacctgtccgtgccgcaccacggcgagatcatcctgcagaggtggggcgggagcaagagcatcacggtggaggaggccaaggccaagatcgctgacatcctcgaggagtacctcgccgccggcgacatcggagaggcttgccggtgcatcaggggcctcaagatctctttcttccaccacgacatcgtcaagcgcgccctcaccctcgccatggagcgcggcggcggcgccgaggggcacatcctggatctcctcaagtcggcgtccgacgaaggcatcatcaacgagagccagatcaccaaagggttcaaccgcctcatcgattccgtcgacgatctgacgctcgacgtgccaaacgcgaggcgcctcctgaaatcgatgatcctgaaggcctcgtcggagggatggctctgcgcgtcgtcgctgaagccgctgggccccgagccgaagaaggccgtcgtcgaggacgacgctgcggtgcggcagttcaaggcgaagacattgtcgatcataaaggagtacttcttgacaggggacatcatcgaggtgatgagcagcctggaggccgagaactacgcgtgttcctcctcctacaacgccatcttcgtcaagaagctgatcacctccgcgatggaccggaagagccgcgagaaggagatggcgtccgtgctgctgtcctcgctcggaatgccgccggaggacgtcgtgtcggggttccacctcctgatcgagtccgccgaggacgccgcgctggacaaccccgccatcgtcgaggacctgaccatgttcttcgccaggtcagtggtcgacgaggtgatcgcgccatcgaacctagagaaaatggaggaggaggccggccgcggcaagccagggggatcctccaccggcttattggcgctccggaacgcccgtgccctgctcggcgcgaagctctctgcggagcggatactgcgttgctggggcggcggcgccaccggcaaggccgggtgggagctggacgacgtgaaggacaagatcggcaggctgctgcaggagtacgactgcggcggcgacatccgggaggcgtgccagtgcatcaaggagctcgggatgccattcttccaccacgaggtggtgaagaaggcgctggtggcgatcatggagaagcgtggcaaggacgagcggctgtggggcctcctcgccgagtgctacggccgcggcctcatcacgccgaaccagatgaccaagggcttcgagcgggtggccggctgcgtcgacgacctcgcgctcgacgtgccggacgccggcaagcagttatgctgctacgtcgagcgcgccaagaagggtggatggctggacgcgtccttccccaacggtgtgcgctcgtgaagaacacccggttaatttatatacatgcagatgcagcactggcattccaggggatttcatttgcaactttacacagctatatactactttgcattccgttccatgtatgtatcagcaaagggaatatgactagcacaagaaagaaaattgttgtcataggattaggaagctttgatcttccattttagcagttgcgcggcgtttagcccggaggatttgtgcattgaagagtttgtgttgtttttaatatgatgtgagagtttctgttgtttttgttttgtgaattggctgctgagagaattaccatgctacaccttgttatcttatcacatcctatatatctataaagtttatctccactaaatgtagttaatgct

SEQ ID NO: 5001 - DNA, 1987 bp, Oryza sativa Japonica Group
atggagtcccgtcctgatgatcttgttcctcccgcgatgcacaagccggcgatccaatgcgccgccgccgaggtagatccgtatttgcgttgattttgcctctgcgttttttttcttttaactatcatggcgaggtggttaatttgtcatcaggacgcgagcctgctgcgaagcccgacggtgtcgtcggaggagttcatgcagttcaagaggaaagccacgacgatcttggaggagtacttctccacggacgacgtcgcggcgacggcgaacgagctgagggagctgcgcgtgccgtgctaccactactacttcgtcaagaagctggtctcggtggccatggaccgccacgacagggagaaggagatggcggccgtgctgctgtcctcgctgtacggcgacgtcatcgaccggccgcaggtgtacaaggggttcggcaagctcgccgagtcctgcgacgacctgtccgtcgacacgcccgacgccgtcgacatcctcgccgtgttcgtcgcccgcgccatcatcgacgacatactcccgccggcgttcctggccaagcagctgacgtgcctgccggagggatgcaagggcgccgaggttcttcacagggcggagaaaagctacctgtccgtgccgcaccacggcgagatcatcctgcagaggtggggcgggagcaagagcatcacggtggaggaggccaaggccaagatcgctgacatcctcgaggagtacctcgccgccggcgacatcggagaggcttgccggtgcatcaggggcctcaagatctctttcttccaccacgacatcgtcaagcgcgccctcaccctcgccatggagcgcggcggcggcgccgaggggcacatcctggatctcctcaagtcggcgtccgacgaaggcatcatcaacgagagccagatcaccaaagggttcaaccgcctcatcgattccgtcgacgatctgacgctcgacgtgccaaacgcgaggcgcctcctgaaatcgatgatcctgaaggcctcgtcggagggatggctctgcgcgtcgtcgctgaagccgctgggccccgagccgaagaaggccgtcgtcgaggacgacgctgcggtgcggcagttcaaggcgaagacattgtcgatcataaaggagtacttcttgacaggggacatcatcgaggtgatgagcagcctggaggccgagaactacgcgtgttcctcctcctacaacgccatcttcgtcaagaagctgatcacctccgcgatggaccggaagagccgcgagaaggagatggcgtccgtgctgctgtcctcgctcggaatgccgccggaggacgtcgtgtcggggttccacctcctgatcgagtccgccgaggacgccgcgctggacaaccccgccatcgtcgaggacctgaccatgttcttcgccaggtcagtggtcgacgaggtgatcgcgccatcgaacctagagaaaatggaggaggaggccggccgcggcaagccagggggatcctccaccggcttattggcgctccggaacgcccgtgccctgctcggcgcgaagctctctgcggagcggatactgcgttgctggggcggcggcgccaccggcaaggccgggtgggagctggacgacgtgaaggacaagatcggcaggctgctgcaggagtacgactgcggcggcgacatccgggaggcgtgccagtgcatcaaggagctcgggatgccattcttccaccacgaggtggtgaagaaggcgctggtggcgatcatggagaagcgtggcaaggacgagcggctgtggggcctcctcgccgagtgctacggccgcggcctcatcacgccgaaccagatgaccaagggcttcgagcgggtggccggctgcgtcgacgacctcgcgctcgacgtgccggacgccggcaagcagttatgctgctacgtcgagcgcgccaagaagggtggatggctggacgcgtccttccccaacggtgtgcgctcgt

SEQ ID NO: 5002 - DNA, 2409 bp, Hordeum vulgare subsp. vulgare
gccagctctctctcaatcgctccctgaggcagagctgtccctacggaagacagccagaataatacgggagctcctcaacattttcgttccatgttgattccttccttctaaccgatcatacctgtacatgtaaccggccggagtttcgtgtccaaaggcgcctccatctggtgaggccatctgcacctcacggcgcctaattggactgtataataacggagttgcagagagtcaatccccaatggaggagggcttcgctccgcccgcgcgccagtcgccgatcaaatgccccaccgccgccgaggacgtggagcagctgcccaccccgacggtgtcgtccgaggagttcctccagttcaagaggaaagccaccacgatcgtggaggagtacttctccacggacgacgtggccgcgacggcgaccgagctgagggagctgcgcgtgccctgctaccactactacttcgtcaagaaggtcgtctcggtggccatggaccggcacgacagggagaaggagatggcggccgtactcctctcctcgctctacggcgacgtcatcgaccgcccgcaggtgtataagggcttctgcaagctcgccgagtcctgcgacgacctctccgtcgacacgcccgacgccgtcgacatcctcgccgtcttcgtcgcccgtgccatcgtcgacgacatactgcccccggcgttcctggcgaagcagctgccgtgcctgcccgacggctgcaagggcgccgaggtcatccgcagggcggagaagagctacctgtccgtgccgcaccacggggagatcatcctgcagagatggggcggcatcaagagcatcaccgtggaggaggccaaggccaggatcgccgacatcctggaggagtatctcgctgccggcgacacggccgaggccttccggtgcatcagggaactcaacatccccttcttccaccacgacgtcgtcaagcgggcgctcgttctcgccatcgagcgcggcggcgcggccgagggccacatcctggatctcctcaagtcggcgtcggaccaaggtgtcatcaacgagagtcagatcatcaaaggcttcaaccgtatgatcgactccgttgacgacttgacgctcgacgtgccaaacgcgaggtgtctcctgaaatccataatcctcaaggcttcgtcggagggctggctgtgtgcgtcgtccctgaaaccgttggggtcggagccgaagaaggtcgtcgaggatgacccggctgtcaagaggttcaaggcgaaggccgtggcgagcatacatgagtacttcttgacaggggacatcatcgagtcggtgagccggctggaggccgagaacagctcgtgctcctgctttttcaacgccatcttcgtcaagaagctcatcagcttcgccatggaccggaagaaccgcgagaaagagatggcatccgtgctgctgtcctcgatctgcatgccgccggagcacgtcgtcgcagggttccacctcctggtcgactgcgccgaggacgccgcgctggacaaccccgccatcgtcgaggatctgaccatgttctttgccaggtcagtggtcgacgaggtcatagcgccatcggacttggaggcggtggaggaggaggccggccgccgcaaggccgctggctcccccgggatgttggctgtgcgcaacgcccacgctatgctcggagcaaagctctccgcggagcggatcctgcggtgctggggcggcggtggcaccggcaaggccggctgggagctgaacgaggtgaaggacaagatcggcaagctgctgcaggagtacgacagcggcggcggcgtccgggaggcgtgccggtgcatcaaggagctcgggatgccattcttccaccacgaggtggtgaagaaggcgctggtggcgatcatcgagaagcggggcaaggacgagcgcctctgggggctgctcagcgagtgctacggccgcggcctgatcacgccgaaccagatgaccaagggcttccagagggttgccgactgcgtcgacgacctcgtgctcgacgtgccggacgccggcgagcagctcggccgctacgttgagcgcgccaagaaggggggatggctggacgcgtccttctccgttgtcaagccggggcaggcagcggccccagatggtattgctgtttgttcatgagcaccggttacatgcaaacacactagtgacattccaggggagttcgtttggtttgcaacaactttacgccactatattacgtgtatgtatctgcaggtatgaaagaagacggtcaattaggagtatataatgttcgcacaggaatgtgctataggatatagggagtatgatcttccaaagtaggaggttttcatggcgtttagcgtgaggatttgtgcattgaagagtttgtttttgcc

SEQ ID NO: 5003 - DNA, 2131 bp, Hordeum vulgare subsp. vulgare
ggccgccagcccatccccatccccaccacgccacgctgccaaccccctccctctccctttccccactccccctcccgccgtcgtcaacctacccaaatcccccccgccccgccccgccccgcgcagatcccgcccgccgcgccggtggccgccccgccgccggcgacaccgcagcatacccgcccccacccccctcgcgcgcccaaaccctagcccgtgccccaccccccccgcccctactactctactcgacagagatccgatctgacggggccgaggcggcgcaccggaaccccggcggggccgagatgggggacttcaacgtggcgctggtgatcgtggcggcggtggtgagcgtcctggtgctgctcgtcagcgtctacctgctcgtcaactaccagcaccccgacgacgccaaccaggcctacttccccaagctcgtcgtcgtgctcggcatcaccgtcgccgtcctctcaatcctcatgctccccgccgacgtcgccaacaggcaggcctgcaagcgggccgtctacagcggggcctgctccctcaccctccccatgaagacgctctggctcgtcgtctacatcatcgacgccgtcctcgtcttcctcgtcataccgttcgccatgttctactacgagggcgaccaggacaagtccgtcgggaagcggctcaagagcgccctcatatgggtcgtcgcctccgccgtcgtctgcggcctcgtcctcggcatcctatacgcacttattggcaaagtggacttcactgtcaggcacctctcttcatctgtccagacatttccaggcccaaaccagttcggtgcattcacaagtggccaaccttgcatcgctccattgacccgtcagtgttcagctaatactgcacctgctaactctcaaacaacttggacaatgcgtgctacattccctgaatacgtggttgcccttgctaccattgttggatctgtgctcttcacaatatttggtggtgttggcattgcttgccttcccttgagtcttatattctcgtttgtccggcgtccaaaagctgtcatcacacgctcacaatatataaaggaagcaactgaattaggtaagaaggccaaggaattgaagaaggcagctgaagcccttcaccaagaagagagaagtgggaacaaaggcagaaaatggcgcaaaaatgtgaaggctgtcgagaaggagttgttacttttggaaaatgacatgaatgccctggaagagatgtaccctcaaggagagaaggctgaggctacctgggcttttacagtgcttgcttacattggaaaactcatattcggcattgttgggttaattgtatcgattgcttgggttgcacatattatcatatacttgttggtggatccccctctatcttctttcctgaatgagatcttcataaagctggacagtgtttggggtctgcttgggactgctgcttttgcattcttctgtttctatctcctcatcgcagtcattgctggggaaatgatgcttggcctgaaactagttttcatcaccattcacccaatgaaatggggaggaactttgatgaattctttcctgtttaatgtcggattgatcctactctgttccatcagtgtgattcagttctgcgcgacagcttttgcgtattacgcacaagcgactgcagcccaggagatctttggccacacactgcagtctcttcgcggaatcaagtatctctacaagtacaatgttttccaatatggatttgttgctctcgccatactcacactcttctactatgcactttttggatggcgaaagaggaaaccgacaggaaggttccagctctcaaactaattttcggtttgctctgtaagcaacgcctgacaaattcaacatcatatttgttcccgagtgatagtttggttagcgatgtatatgatcttcaaaccgctttctggaagagttggggcgttttcatgggtgtaaattaggcaacgaaaatcttggaagatggaaaacacccacggacacggatgttaaagtagaagaacctagtttcctttgtaatgtacacattcctcatctcggttcttttctgtattattgttttatgatcatcaatcggctgatgttattat

SEQ ID NO: 5004 - DNA, 2197 bp, Zea mays
gctacctgcctcccttcttgcacccaccgctgccgtcctgcccagatcccgctcgccggtggtgctcccctccccccgcgccgctggcgccgccggagcgagggggactgcccaaaccctagtgggagttggagactaggaggaagggcgcgagatccggcggcggccaccccgatgggggacttcaacgtcgcgctggtgatcgtggcggcggtggtcagcgtgctggtgctgctcgtcagcgtctacctgctcgtcaactaccagcaccccgacgacgtcaaccaggcctacttccccaagctcgtcgtcgtgctcggcctcaccgtcgccgtcctctcaatcctcatgctccctgccgacgtcgccaatcgccaggcctgccgcaaggccgtctacaacggcgcctgcagtctcacgctccccatgaggacgctctggctcgtcgtctacatcgtagacgccgtcctcgtcttcctcgtcatccccttcgccatgttctactacgagggcgaccaggacaagtccgtcgggaagaggctcaggactgcgctcatctgggtcgtcgcgtccgcggtggtgtgcggcctcgtcctcggcattctatacggacttgttggtaaagtggacttcactgtgaggcacctatcttcatcggtccagacatttccaaactcattttctggattctcaagtggccagccttgctttagtccattgactcgtcagtgtgcggcttctactgcaccggctaactcgcaaacaacttggacaatgcgtgctaccttccctgaatatgtggttgctcttactacaattgttggatctgtgcttttcacgatatttggtggtgtcggaattgcctgccttccattgggacttatattctcatttgttcgtcgtccaaaagctgtaattacacgctcacaatatataaaggaagcaactgaactgggaaagaaggccagggagttaaaaaaagctgctgaagccctacaccaagaagaaagaagtgggaacaagggccggaaatggcgcaaaaatgtgaaggctttagaaaaggagttattactcctggaagatgacatgaaggctctagaagagatgtatcctcaaggagaacaggctgaggctacttgggcattcacagttcttgggtacatcgggaaacttctatttggtgttgttgggttaattgtttcaatagcttgggttgcacatattgtcatatacttgttgattgatcctcctctatcttctttcctgaatgaagtcttcataaagttggatggtgtttggggtctgcttgggactgctgctttcgcattcttctgcttctatcttcttattgcagtgattgctggggagatgatgcttggattgaagctagtttttatcacaattcacccgatgaaatggggaggcactttaatgaactccttcctgtttaatgttgggctcatactactttgctccatcagtgtgattcagttctgtgccacggcttttgcctactacgcacaagcaactgcagctcaagagatatttggccacactttgcaatcccttcgtggaattaagtatctttacaagtacaatgttttccagtatggctttgttgctcttgccatcctcactctcttctactatgctatatttggatggagaaagaggaaaccaacaggaagattccagctctcaaattgatttgctctgtaagtgaagtttgacggattcatcatatgtgccccctgagtggtagttcagttagcatcttagaaatgtatatgatcaacaaaaccaaaccaatccaaaccaaatcatcttcccaaagagttgaggaactgcaaatgatcaactctgagaccttaaaggccagaattatcaactctgagactttgaaggcaagaatggggcaactgttggttaccacggacatggatgttaaagtagaacccagttgactttgcaatgtacacatttcttgtatcggctcttcatttacgtctgtattatcgcttttatgattggatgatgatgttattcttgagagatgttcggtgtgtttgggggcgcttagcccccctttgatattcattcgtgttgggagttaggtcaattcattgcttttatatgtgttatatactgtgattacaatgcaagattctaggttgtattaatgatgccttgatcattc

SEQ ID NO: 5005 - DNA, 2197 bp, Oryza sativa Japonica Group
aagcaaagcagagatcacgtcctcccaggactggagcctggagggccaaaaccccccaaatttcccaagccaacccaaccaaaccggccgtctcgtctccttcgtcgttggcaatgcctccactgccagcctagcccacgctgcccaccgccccacccccccaaccccaacctccctccactccccctagctttccccctccacctcgtcgtcgtcgtcaacccacctcacccccaacccccaaccccaactcctcctcccccccaaatcccccagatcccgcacgccgccggtggccgcagcgccgccgccgcccaaaccctagccggcgggcgggcgcagtagcggagatctggtaccgtgccgcgatgggggacttcaacgtggcgctggtgatcgtggcggcggtggtgagcgtcctcgtcctgctcgtcagcgtctacctgctcatcaactaccagcaccccgacgacgccaaccaggcctacttccccaagctcgtcgtcgtcctcggcatcaccgtcgccctcctctccatcctcatgctccccgccgacgtcgccaaccgccaggcctgccgccgcgccatctacagcggcgcctgctccctcaccctccccatgaagaccctctggctcgccgtctacatcgccgacgccgtcctcgtcttcctcgtcatccccttcgccatgttctactacgagggcgaccaggacaagtcagtggggaagaggctcacctccgctctcctgtgggtcgccgtctccgcggtggtttgcggcctcatcctcggcatcctatacggacttgttggcaaagtggacttcactgtcaggcatctttcttcagcagttgagacatttccaaattcattcactagtttctcaactggtcaaccttgcatcagtacatcgcccaagcagtgcgcagcttacactgcacctgctaactctcaaacaacttggacaatgcgcgctaccttccctgaatatgtggttgctcttgctaccatcgttggatctgttctcttcacaatatttggtggtgttggaattgcttgccttccattgggacttatattctcatttgtccggcgcccaaaagctgtcattacacgctcacaatatataaaggaagcaactgaactaggtaagaaggctcgggaattgaagaaagcagctgaagcccttcaccaagaagagaaaagtgggaagaagggcagaaaatggcgcaaaaatgtcaaggcccttgggaaggaattagtacttttagaagatgacatgaaggctcttgaagagatgtaccctcaaggagaacaggctgaggctacctgggctttgacagttcttggttacattggaaaacttttatttggtgctgtcgggttaattatatcgattgcttgggttgcacatatcgtcatatacttgttgattgaccctcctttgtcctccttcctgaatgaaatcttcgtaaaattggatggtgtttggggtctgcttgggactgctgcctttgcattcttctgtttctatctcctcatagcagtgattgctggggaaatgatgctgggtttgaaattagttttcatcaccattcacccaatgaaatggggaggaactttgatgaactcgttcctgtttaatgttggactcatcctactttgctccatcagtgtgattcagttctgtgccacagcttttgcttattatgcgcaagcaactgcagctcaggagatctttggccacacactgcaatctctccgtggaattaagtatctctacaagtacaatgttttccagtatggctttgtggctcttgcgatactcacactcttttactatgcaatatttggatggcgaaagaggaaaccgacaggaagattccagctctcaaattgatttgtggtttgttctgtaaggaagcctgacgaattgaactacaaacatatttgttcacgagtgatagattggttagcaatgtatatgatctttgaaaccgctttctcaaagagctggagagtttatccatgtaaattagcaaccatgaagtataaggagaaaactgagatttcagtagggcacggacatggttgttaaaagcagaacccagctgcctttgtaatgtacacatttctcatcgcggctcttcttttccttgtgtattattattttacacttggctgatgttattcttg

SEQ ID NO: 5006 - DNA, 1674 bp, Arabidopsis lyrata subsp. lyrata
gacctcgtacattgcacgcgatgggagatttcaatctcgctctcgtgattgttgcgatcgtagtttgtgtccttgttttcatctccagtatctacctcctcgtcaactatcagcatccagatgatgcaaaccaggcttatttccccaaattcgttgttgtgtttggtttatcgattgctatgatctccattctcatgttaccggcggatgtggctaaccggcatgcttgtcgacattcgatttataatggcgcttgtaatctcaccttacccatgaaggagctttggcttgccgtttacattgttgacgctgtgcttgtcttcttcattatccccttcgctatgtttttctatgaaggcgaccaggacaaggctcttgggaagaggataaaaagtgctttgatttgggtggttactacagctgttgtttgtgctctggtgcttggaattttatacggagtcattgggaaggtggacttctctgtaaggcacttgtcttctgccacaacgactttccctacttcatggcagttttcaaataatcaaccttgcattggtaacactgctcgtcagtgctcagcatatacagctaatgctgcgtctgaaaagacatggtccatgcgtactacgtttccagaatatgttgttgctcttgctacaattgttgggtcagtgctcttcacgatatttggtggtgttggtattgcttgcctacccttgggccttatcactgcattcatcaggcgaccaaaggctgttatcactcggtcacagtatataaaggaagcaactgaactaggtaaaaaggcaagagatctaaagaaagcagctgatgcacttcaccaggaagaacgaagtggtgctaagggaaggaagtggaggaaaaatgtgaaagcagttgaaaaggagttgctccaattggaagaagatgtgaacctcttagaagagatgtatccgcaaggagagcaggcagagactgcttgggccttcactgtcctgggatacttggccaagtttattcttggaatcttaggattaattgtttctgtggcttggattgctcacatcatcatatatctacttgttgaccctcccctctctccttttcttaatgaagttttcatcaaactggatgacgtctggggtctcctgggcacagctgcctttgctttcttctgtttctatctcctactttctgttattgctggggcaatgatgcttggtttgaagctggtcttcattaccattcatccaatgaaatggggagccactcttatgaactcttttctcttcaatgtcggtctcattctcctctgttctatcagtgtgattcaattctgcgccactgcatttggatattatgctcaagccaccgccgctcaggagatatttggccacactttgcagtcccttcgcggtattaagtacctctacaagtacaatgtgttccagatcgggtttgttgtcctcgctggactgacctttttatattacatagcctttggatggagaagaaaaaagccgagcggtagattccagctctctacctaatgtaaatctcttcttttgattttatcctttttgtttcctcgtctttgggatcgatcgcgtgccgctgaggattgctgtgtccacaattataccgagattggtctcatgatctgtgcaagtggtc

SEQ ID NO: 5007 - DNA, 1742 bp, Ricinus communis
atgggcgattttaatctcgctctagtgattgtggctatagttgtatgcattgtggttttgttattcaatgtttaccttctcgtcaattatcaacatccagatgacaaaaaccaagcctattttcctaaattcgtcgtcgttttaggcctctccgtagccctcatttctatattaatgttaccggcggatgtagcaaaccggcaagcttgtcgccacgcgatttataatggtgcctgtaatctcactctcccgatgaaagatctatggatcgctgtctatatcatcgacgccgtgctcgtcttctttataattcccttcgccatgttttactatgaaggcgaccaggacaagagtgttggtcaaaggataaaaagcgcgttagtgtgggtgataacaacggctattgtatgcggtctcgtgcttggcattttatatgggctagttggaaaggtggacttcactgtcaggcacctctcttcaactacgactaactttccaagtacttgggagttctctagtggccaaccatgtattggaagtggtgcacgccagtgctctgcgtaccttgccaatgcttcttcagagaaaacatggagcatgcgcaccacatttccagaatatgttgttgctctggctacaattgttggatctgtactttttgcgatatttggcggtgttggtattgcttgtttaccattgggacttatattttcattcatccgccgtccgaaggctgttatcactcgttcacagtatattaaggaagcaactgaacttggtaaaaaagcaagagagttgaagaaagcagctgatgcacttcatcaggaagaaagaagtggttcgaagggcagaaaatggcgtaaaaatgtgaaggcagtagagaaggaattgtttcaattggaagaagatgtaaagttgttggaagagatgtaccctcaaggagaaaaggccgagacaagttgggctttgactgttctcgggtacttggccaaactagtgttggggatcttagggttgattgtttcagtggcttgggtagctcatatcgtcatatatctgttgattagcccacctctttctccatttttgaatgaggttttcatcaagttggatgacgtttggggtcttctgggtacagtggcgtttgcattcttctgcttctatcttctgcttgcagtgatagctggggcaatgatgttgggactgagattagttttcatcacaattcatcccatgaagtggggaggcactctgatgaactcctttcttttcaatgttggacttattcttctatgctccattagtgtgattcagttttgctctacagcatttggctactatgctcaagcaactgctgcacaggaaatttttggccacacattgcagtctctacgaggaattaagtatttatacaagtataatgtttttcaatatgcatttattgttctggcggttgtgaccttgctgttatatgctgcctttggatggagaagaaaaaagccaactggcagattccagctttcctcctaaggcatgcttttaaataaaagttggagcccttaggagtttgcaggtgtatgatctcttggggagtgttgtttcatatttggatggatgtctatggcctagttttgcttttgtcagaagttttagaggtaggcctgcatcatcttcgtaaattgggtggctgtggtgggagtgcagggtgagtgctcctgctgtttctgcttgttatccccttt

SEQ ID NO: 5008 - DNA, 1845 bp, Arabidopsis lyrata subsp. lyrata
gaaagaaatccagatctactaaaatacccaaattcaattttcaaatctctcgaattggggaccttgtacattgcacacgatgggcgatttcaacctcgctctcgtgattgtcgcgatcgttgtttgcgtcatcgttttcatctctagcatctatctcctcgtcaactaccagcatccagatgatgcaaaccaggcttatttccccaaattcgtcgttgtttttgggctgtctattgctatgatctcgattctcatgttaccggcggatgtggccaatcggcatgcttgtcgacatgctatatacaacggagcttgcaatctcacattgcccatgaaggatctttggcttgccatttacatcgttgacgctattctcgtgttctttgtcatccccttcgcaatgtttttctatgaaggcgaccaggacaagactcttggaaagaggataaaaagcgccttaatttgggtggtaaccacggctgttgtttgtgcgctggtgcttggaattttatatggtgtcattggaaaggtggacttctctgtcaggcacttggcttctgccacatccactttccctacttcctggcaattttcaaatactcaaccatgcatcggtaacaccgctcgtcagtgctcagcatttacagctaatgccacatctgagaaaacatggaccatgcgtactacttttccagagtatgttgttgctcttgcgacaattgttgggtcagttcttttcacgatatttggtggtgttggtattgcatgtctacctctgggacttatcactgcattcatcaggcggccaaaggctgttatcactcgatcacaatatataaaggaggcaaccgaactaggtaaaaaggcaagagaactaaagaaagcagctgatggacttcatcaggaagagagaagtggtgctaagggcaggaagtggaggaaaaatgtgaaagcagttgaaaaggagttgctccaattggaggaagatgtgaacctcttagaagagatgtatcctcaaggagagcaggcagaaactgcatgggctttcactgtgcttggatacttggccaagttcattcttggaatcttaggattgatcgtttccattgcttgggttgcacacatcatcatatatctactcgtcgaccctcctctctccccttttcttaacgaggttttcattaagcttgatgatgtttggggtcttttaggcactgctgcctttgctttcttctgtttctaccttctacttgctgttatcgctggggcaatgatgctgggtttgaagctggtcttcattaccattcatccaatgaaatggggagctactttaatgaactctttcctcttcaatgtcgggctcattcttctttgttcaatcagtgtgattcaattttgtgccactgcatttggatattacgctcaagccactgctgcccaggagatatttggtcacacattgcagtcgcttagaggaattaagtacctttacaagtacaatgtgttccaaatcgggtttgttatcctggctggactgactttcctatattacattgcctttggatggagaagaaaaaaacccagtggccgtttccagctctcttcttaatgtaaaacgttttcacggggatctgattgagtgctgtcgacagagtttctacttgtttttggatcatcatcgattccagaagtatctagtgactctgcttctgaggtttattttcctgaatgtattattaaatttcttgtgagtgtactgtttggttgtgcaacacttagctgtccggtcttggtctattgtactgtttcggatgcgatcatgtaatcatatttttttaatgagaa

SEQ ID NO: 5009 - DNA, 2108 bp, Arabidopsis thaliana
atacggaaaaaaaaaaccagatctacaaaaataaataatccccaaattgaatttcaaatttcgaagcttcaagaaaccctaatttttctcaatctaagctgaggtttgggatctcgtacattgcacgcgatgggagatttcaatctcgctctcgtgattgttgcgatcgtagtttgcgtcattgttttcatctccagtatctacctcctcgtcaactatcagcatccagatgatgcaaaccaggcttatttccccaaattcgttgttgtttttggtttatccattgctatgatctctattctcatgttaccggcggatgtggctaaccggcatgcttgtcgacattcgatttacaacggcgcttgtaatctcaccttacctatgaaggatctttggcttgccgtttacattgttgacgctgtgcttgtcttcttcatcatccccttcgctatgtttttctatgaaggcgaccaggacaaggctcttgggaagaggataaagagtgctttgatttgggtggttactacagctgttgtttgtgctctggttcttggaattttatacggagtcattgggaaggtggacttctctgtaaggcacttgtcttctgccacgactactttccctacttcatggcagttttcaaataatcaaccttgcattggtaacactgctcgtcagtgctcagcatatacagctaatgctgcgtctgaaaagacatggtccatgcgtactacgtttccagaatatgttgttgctcttgctacaatcgttgggtcagtgctcttcacgatatttggtggtgttggtattgcttgcctacccttgggccttatcactgcattcatcaggcgaccaaaggctgttatcactcggtcacagtatataaaggaagcaactgaactaggtaaaaaggcaagagatctaaagaaagcagctgatgcacttcaccaggaagaacgaagtggtgctaagggaaggaagtggaggaaaaatgtgaaagcagttgaaaaggagttgctccaattggaagaagatgtgaacctcttagaagagatgtatccgcaaggagagcaggcagagactgcttgggccttcactgtcctgggatacttggccaagtttgttcttggaatcttaggattaattgtttctgtggcttggattgctcacatcatcatatatctacttgttgaccctcccctctctccttttctgaatgaagttttcatcaaactggatgacgtctggggtcttcttggcacagctgcctttgctttcttctgtttctatctcctacttgctgttattgctggggcaatgatgcttggtttgaagctggtcttcattaccattcatccaatgaaatggggagccactcttatgaactcttttctctttaatgtcggtctcattctcctctgttctatcagtgtgattcaattctgcgccactgcatttggatattatgctcaagccaccgccgctcaggagatatttggccacactttgcagtcccttcgcggtattaagtacctctacaagtacaatgtgttccagatcgggtttgttgtcctcgctggattgacctttttatattacattgcctttggatggagaagaaaaaagccgagcggcagattccagctctctacctaatgtaaatctcttcttttgattttatcgtttatgtttcctcgtctctgggatcgatcgcgtgccactgaggattgctgtgtccacaattataccgagattggtctcatgatctgtgcaagtggtcttatatcataagaacaagcacctgcccaaaaagcttctctttcttctgcttctctttgctgctgaggtttgttttcatttcacttgaatgtaaaattattcttctttttctcttatcttttctcctgtatctattgctttatttttgtttgattaattacaagaaagatctctttgtcgccgtcttctcatggcctattgaatgatttcgaatactttcttgtaaccattacttggttgagagtttagactgtcagaacaaattcaggttttggagttatttgtgtgtatagtgtgatgacaagagacttcataccattgttgca

SEQ ID NO: 5010 - DNA, 1954 bp, Arabidopsis thaliana
gagagggaaaaaaagaaagaaatccagatctactaaaatccccaaattcaattttcaaaatttgaactcctagaaaaccctagcctttgcaattgggtgctacatcttccaaatcgttccgggatcgaaatctctcgaattggggacgttgtacattgcacacgatgggcgatttcaacctcgctctcgtgattgtcgcgatcgttgtttgcgtcatcgtattcatctctagcatctatcttctcgtcaactatcagcatccagatgatgcaaaccaggcttatttccccaaattcgtcgttgtttttggcctttctattgctatgatctcgattctcatgttaccggctgatgtggccaatcggcatgcttgtcgacatgctatatacaatggagcttgcaatctcaccttgcccatgaaggatctttggcttgctatttatatcgtggacgctattctcgtgttctttgtcatccccttcgcaatgtttttctatgaaggcgaccaggacaagactcttggaaagaggataaaaagtgccttaatttgggtagttaccacggctgttgtttgtgctctggtgcttggaattttatatggtgtcattggaaaggtggacttctcggtcaggcatttggcttctgccacatccactttccctacttcctggcagttttcaaatactcaaccatgcataggtaacactgctcgccagtgctcagcatttacagctaatcccacatctgagaaaacatggactatgcgtactacttttccagaatatgttgttgctcttgcgacaattgttgggtcagttcttttcacgatatttggtggtgttggtattgcatgtctaccattaggacttatcactgcattcatcaggcgaccaaaggctgttatcactcgatcacaatatataaaggaggcaaccgaactaggtaaaaaggcaagagaactaaagaaagcagctgatggacttcatcaggaagaaagaagtggtgctaagggcaggaaatggcggaaaaatgtgaaagcagttgaaaaggagttgctccaattggaggaagatgtgaacctcttagaagagatgtatcctcaaggagagcaggcagaaactgcatgggctttcactgtgctcggatacttggccaagtttattcttggaatcgtaggattgatcgtttccattgcttgggttgcacacatcatcatatatctactcgtcgaccctcctctctccccttttcttaacgaggttttcattaagcttgatgatgtttggggtcttttaggcactgctgcctttgctttcttctgtttctaccttctacttgctgttatcgctggggcaatgatgctgggtttgaagctggtcttcattaccattcatccaatgaaatggggagctactctaatgaactctttcctcttcaatgtcggcctcattcttctttgttcaatcagcgtgattcaattttgtgccactgcatttggatattacgctcaagccactgctgcccaggagatatttggccacacattgcagtcccttagaggaattaagtacctttacaagtacaatgtgttccaaatcgggtttgttatcctggctggactgactttcctatattacattgcctttggatggagaagaaaaaaaactagtggccgtttccagctctcttcttaatgtaaaacgttttcacggggatctgattgagtgctgtcgacaaagtttctacttgtttctggatcatcatcgattccagaagtatctagagactctgcttctgaggtttattttcctgaatgtattattaaatttcttgtgagtgtgctgtttggttgcgcaacagttagctgtcctgtcttggtctattgtactgtctcggatgcgatcatgtaatcatattttcttaatgagaagccttcttcgaatttttacaagac

SEQ ID NO: 5011 - DNA, 1962 bp, Vitis vinifera
tacgaatccctctcttttgagtccgtacaaccatcatcgtcgagaaagaaaccctaatctctctaattcgagggcttcaacgatgggggatttcaatctggccctagtgatcgtggccatagtggtgtgcgttctcgtcttcctcttcaacatctaccttctcgtgaattaccagcatcccgacgatgcaaaccaggcttattttcccaaattcgttgtcgttttggggctctccattgccgccatttcgatcctcatgcttcccgccgacgttgccaatcggcaagcctgtcggcatgcgatatataatggcgcatgtaactttaccctgccgatgagggatctgtggctcgccatttacattgttgatgctgtactcgtattctttgttattcccttcgccatgttctactacgaaggcgaccaggacaagagcgttggcaagcggataaaaagtgccttattatgggtcatcactacagccatcgtctgtgctcttgtgcttggcattctatatgggctagtcggaaaggtggacttcactgttaggcacctctcttcatccacgacttcctttccaacgtcatgggaattgtccagtagccaacaatgtattggaagtggcacacaccagtgctctgcatattctgcaagtgcttcatctgagaaaacatggactatgcgcactacttttccagaatatgttgttgctcttgctaccattgtcggatctgtacttttctctatatttggaggggttggtattgcttgtttgccattgggacttatattttcattcattcggcgtcccaaggctgttatcacacgttcacagtatatcaaggaagccactgaactaggtaaaaaggcaagagacttgaagaaagcggctgatgcgctccatcaggaagaaagaagtggttccaagggtagaaagtggcgtaaaaatgtgaaggcagtagagaaggagttgcttcagttggaagatgatgtaaaggctttagaagagatgtacccgcagggagaaaaggctgagactacatgggctttgactgtccttggctacttggcaaaacttgtgttgggtattttagggttgattgtttcagtggcttggattgctcatatcgtcatatatttgctgattgatcctcctctgtctcctttcttaaatgaggttttcatcaagctagatgatgtctggggtctcttgggtactgcagcatttgcattcttctgcttctaccttctgcttgcggtgattgcaggggcaatgatgcttggacttagattagttttcattacaatccatcccatgaagtggggtgccactcttatgaactcctttctttttaatgtgggacttattctcctgtgttccatcagtgtgattcaattctgcgccacagcatttggttactatgctcaagcaactgctgcacaggaaatatttggccacacactggaatctctcaaaggaattaaatatttatacaagtataatgtgtttcaaatcgcatttattgttcttgccggattgaccttcgtatattatgcggcctttggatggagaagaagaagacctagtggcaggttccagctgtccagttgaattgtatctttgcccgggagagcacacacccacctggagcttttgtagttcacagttttatcttttttccggagagaatttcttattcggatgtgtatggccttctttccttttaatgttgagatgtctacagtaggcacaaatcatccggatgaaatttagtcactctagtgtggaagtttcctcacttcatgcatgtattgttccttgtttgatttatgttatacatttgcttgggcgtgtgattgagaaatctcgtgtaacatggggactgggttttgggttgcccttcaatgtaatataatctttgagaacaagaaattttatgatcagcatttcattttcatgta

SEQ ID NO: 5012 - DNA, 1949 bp, Populus trichocarpa
atgggagatttcaatttagcactagtaatcgtagctattgtagtatgcataatcgttttcttgttcaatatctaccttctagtcaattaccagcatcctgacgacaagaatcaagcttatttccccaaattcgtcgtcgtttttggcctcttcgttgccactatctcgattttgatgttaccggctgacgtagcgaaccggcaagcgtgtcgtcatgcgatttataatggcgcgtgtaatcttaccttgccaatgaaggatctgtggattgctgtatacattgttgatgctgtgcttgtttttttcatcattccattcgcgatgttttactacgaaggcgatcaggacaagagtgttgctaaaaggattaaaagtgctttattgtgggttataacgacggcaattgtgtgtggtcttgtgctcggcattttatatgggcttgttggaaaggttgacttcactgttaggcatctctcttcaaccacaactacttttccgagtacgtgggagttctctagaaatcaaccatgtattggaagtgttgcacgcgagtgctctgcatatcttgcaaatgcttcctcagagaaaacatggacaatgcgcgccacatttccagaatatgtggttgctctagctacaattgttggatctgttctctttgcgatttttggtggtgttgggattgcttgtttgccgttgggacttatcttttctttcatccggcgtcccaaggcagttatcactcgctcccagtatattaaggaggcaactgagcttggtaaaaaagcaagagaactcaaaaaagcagctgatgtactccatcaggaggaaagaagtggcaacaagggtagaaaatggcgtaaaaatgtcaaggcagtagaaaaggagttgcttcagctggaagaagatgtaaagctgctagaagaggtgtatcctcaaggggagaaggctgagacatcctgggctttgactgttcttggctacttggcaaaacttgtgttgggaatcttagggttgattgtttcagtggcttgggttgctcatattataatatatctgttgattgacccacctctttctccttttctaaatgaggtcttcatcaagttggatgatatatggggtcttcttggtactgttgcatttgctttcttctgcttctatcttctgcttgcagtcatagctggggcaatgatgctgggcctgagattggttttcattacaattcatcccatgaagtggggagccactctaatgaactccttccttttcaatgtgggactcattctcctatgctcaattagtgtgattcagttctgtgccactgcatttggctactatgcacaagcaacagcagctcaagaaatttttggccacacattgcagtcacttcgtggaattaaatatttgtacaagtataatgtgttccaaattgcatttgttgttctagcgggtttgacttttgtgtattatgccgcctttggatggagaagaaagaagcctagcggcaggttccaactttcctcgtgagcatgtttttaccagaagttcacacacctgcctggaggcttcggaattcagttgtatcatctactctggagtttgtttcatattcggatgtctgcggcccagttttgttaacgtcgaaaggtgttgaaaagtgtgcagatatcatttgatctatttgcggttgctagtgatagtggcatggcatgtcggtgagtgctgctactctttctgcttgttgttgctcgtttgtatgtattattcttaatgtggttagtgctatacgcttgcttccgcacactgtaataggtgggtttgtacaacttccgaagatgtaatataaccattgacaagaagcatgtgtatcttcagcagtgtcctatgtgggtttgtacaacttctgaagatgtaatataaccgttgacaacagaagatcttacaag

SEQ ID NO: 5013 - DNA, 3299 bp, Hordeum vulgare subsp. vulgare
ggttctcccgtgctcccgccccgtccacactcgcgagctccagatccccgaaccctgacccccccgcatgccatcccactagcccgctcgctcgctcccccgcatggcgccgcgtctcctgctcctcgccctcgtcgcggcggccgtggccgtgccgccggcgagcgccgcggtggcgagcatcgacctgggctccgagtggctcaaggtcgcggccgtgcacctcgcgccgggccgcgccccgatcgccgtcgccatcaacgagatgtccaagcgcaagtcccccgcgctcgccgcgctggccgacggcaaccgcctcgccggcgaggaggcggccggcatcaccgcgcgccacccggccaaggtcttctcccgcatgcgcgacctcctcgccaagcccttcccctacgcgcgggccctcgccgactcgctcttcctcccctacgacctcgtccaggacgcgcgcggcgccgccgcggtgcgcgccgacgacggccaggtctacaccgtcgaggagatcgtcgccatggtgctccactacgcctccgggatcgccgacgcgcacgtcggcctgcccgtgcgggacgccgtcgtcgccgtgccgccctacttcggccaggccgagcgccgggccctcacgcaggcggcccagctcgccgggttcaacgtcctggcgctcgtcaacgagcacgccggggccgcgctgcagtacgggatcgacaaggacttctccaacgagtcacgccatgtcatcttttacgacatgggctcaggcagcacctacgccgcgctcgtctactactcgtcctacagcgccaaggaattcgggaagacggtgtctgtcaaccagttccaggttaaggatgtcagatggaactccaaacttggaggccttgaaatggaaatgcgtttggtaaactattttgctgatcagtttaacaagcagcttggcaatggggatgacatccgtcagtctcctaaagcaatggctaagttgaagaagcaagtcaagcgcaccaaagaaattctgagtgcaaatactgctgctccgatctcagttgaatctctatataacgatatcgatttcaggagcacaataactcgtgaaaaatttgaagagctttgtgaagatttatgggagcaggctctgactccaattaaagatgtgcttgcccagtcaggcatgaaaattagtgacatctatgctgtagagctaataggaggagctaccagggtaccgaaactgcaggctaagctgcaggaattcctgggacggagtgagctagataagcaccttgatgctgatgaagcaattgttcttggtgcctcactgcatgctgctaatctaagtgatgggattaagttgaaccgtaagttggggatgattgacggttctacttatggtttcgtgtttgaaatagatggcccagattatgtcaaagatgaaagtactgatcaagtactggtgccaaggatgaaaaaaatgccgataaagttattcaggtcaatcaaacatactaaggactttgatgtgtctcttagctatgacaaagcttctgagttgcccccaggtgttttatcacacaagtttgcggattatgctatatcaggcctgacagaaaccactgaaaagtatggaagccgcaatttatctgcacccatcaaagcaaatctacatttttctttgagtagaagtggaattatttctcttgatagggcagaagcagtgattgagataactgaatgggttgaagttccaaagaagaacgtaacactagagactaataccaccgatcagactttgtctgctgaatcaggaacatctgatagtacaacggatagtaaggagaattctagttcaggaagtgatgctgataattctagcactaccaatgatgagagcaatgtgcaagatactattacagagaaggtgctgaagaaaagaaccttcagggttccattgaaggtcactgaaaaaacagctggtgctgcatcaatcctttcaaaggagctgtattctgaggcaaaaagtaggttaaatgtacttaataagaaggatgctgaacggaggagaactgctgaactgaaaaataacctagagtcttacatatactctatgaaggaaaagttggaggaaagcacagatatgttgaccgtctcaactgaacaggagagggaatcttttacagaaaaactcagtgaggtgcaggattggctgtatatggatggtgaagaggctcaagcaaacgaatttcaagagcgccttgatcagcttaaggccatgggcgacccaattcttttcagaatgagtgagttaaaagcccgaccagcagcttgcggaagtgctcgattatatcttactgagctacaaaagatcgttaagaactgggagacaagcaaaccatggcttccaaaaaagagagtagatgaggtcgtaagtgaagcagataaactgaaagcttggttggaggagaaggaagccctacagaagagcacccctgtccacagcttgcctgctttcacatctgaagaggtctataagaaagttttagccctacaagataaggtctctagtgtcaataggattccaaagccaaaacccaaggttgagaagaaacctccaaaggaagacgctaacaaggacaagacggactcttcagaatctgcatccagcgagcctgagcctgagtccaccgagaagtcgtcggaatcagatgccccggaaaagactaacgattcagaaccagaatctcatgatgagttgtgattattaggatcagcttttgatccccctgggagagatactgctcaatatactccgagaagatagtttgtaccacagttttgtttgacggccgaaagacgaggtttgtgtaggaattcgcggcaggctagatgctatatgggcgagaagaatttgatataaatccctgtatagcagtattgtggtctctagggcatatgctgtcaagatagcgccttgaaaggcttagttgtcaggactgagaagactttgtagctgcattgttgtactgaaactcatttatattttgataacagctactatagagatttcatgtctggtaggggtatcaatgtaccttttagctctttcatactgtctatcacgcattgttgtgaactttcagttaaaggaataagagtgcatccgccttcaggcatgaaaaaagcggtaggcgtaagttaggcggtggcaagacagtaatatagcttttgttgtcagggtgtatctgtggttattatacgtgtatcgatgttaatataggagttggattatg

SEQ ID NO: 5014 - DNA, 1559 bp, Sorghum bicolor
acgtcaaactccttggtccttgccaacctctcccgcccggtctgcgacgcggcgcgcgacgacgacgcacctcgccatggccctcgccctgtccctctccctgtccctctccctcctcctcgtcggcggcgttgtcgtccgcgcgcagccgttcgactacccgacggcgaagccctcgacgaggtgggccaacacggacgcgtccctcccgcaccacgtcacgtacgcggacggctccgtggcgcgcgccgcgctgctgcggctcaacccggcggggtacgggccctcctacgccttcggcttcttctgcaccaaccaccaggcgccgccctgcgccgagttcctcctcgccgtcgccgtcgtctactgcaacagcggcgggctcatgacctccgtcgtggcgggcatcccgcaggtggtctggtccgccaaccgcggccagcctgtcggggagggcgcgtccgcggagctcacggccgcgggcgacctcgtgctccgctccgccaccggcgccgtcgtgtggtcgtccggcaccgctgggcggtccgtggccgcgatggccgtcacccgcgacggcaacctggtgctcctcgacgcgcggaacgccacggtgtggcagtcgttcgaccaccccaccgacgcgctgctcgtcgggcagtcgctgcgcgccggcgcgcgcctcgtcgccaactcctccgccgccaactggtccgcgagccggctctacctgaccgtcgccgacgacagcctcagcgcctacgtcgacgccaagccgccgcagcggtactaccacctgggattcagcaaggccgccggcgcctacgcgacgtacgccaacgggagcctcgcggtgttcgatccggcggcggcgcctgctgcttccacgccgccgctggccaccatccagctccccgaggtcggcgccgggacggtgcagtacatgcggctggagcacgacgggcacctccggctgtacgagtggaacccggccgggtgggcgccggtgttcgacgtcctgcgcctcttcccggacgactgcgcgttcccgacggtgtgcggcgcgtacggcgtgtgcacggacatgcagtgcagctgccctgacgcggccaacttccgggcggtggacttccggaggcccaaccgcggctgcgtcccgacggcgccggtagcctgcggcgggccgccggcaaggctggtgtcgctgccggggctggcctacttcaacgacccggccaccagcctgaaggcgctggagagggtgagcgacgccgcgtgcaggaaggcgtgcctggacgagtgccggtgcgcggcggcgcagttcgtgtacggcgccgacgccggcgacggcttctgctacctgcagtcggaggtgctgtcgatggagacgtcgcggccggaggtggtgcactacaactccaccatgcatctcaaggtgcgggccacgcgtcgtccgtcagccggattttagtgtgagtggaggtggagtggactactgttgtcttggattacgtacgtttccagtccaagacagtgatcaaagatatgtcagaataaagttc

SEQ ID NO: 5015 - DNA, 1591 bp, Zea mays
tgcccgtccagtttgcgacgatgctacagctcgccctcgccctctgcgtcctcaccgccggcggcgtcgtccgcgcgcagccgttcgactacccgacggcgaagccctcgacgacgtgggccaacacggacgcctcgctcccgcaccacgtcacctacgccgacggctccgtggcgcgcgccgcgctgctgcggctcaacccggcggggtacggcccgtcctacgccttcggcttcttctgcaccaaccacctcgcgccgctctgcgccgagttcctcctcggcgtggccgtcgtctactgcaacagcggcgggctcatgacctccgtcgtggcgggcatcccgcaggtcgtctggtccgccaaccgcggcagccccgtcggggagggcgccgccgcggagctcacggccgcgggcgacctcgtgctccgctccgcccagggcgccgtcgtctggtccgccgcgggcaccgcgggccgctccgtcgccgccatggccgtcgcccgcgacggcaacctgctgctcctcgacgcgcgcaacaacacggtgtggcagtcgttcgaccaccccaccgacgcgctgctcgtcggccagtcgctgcgccccggcgcgcgcctcgtcgccaattcctccgccgccaactggtccccgagccggctctacctgaccgtcgccgccgacgacgacagcctcagcgcctacgtcgacgccgagccgccgcagcggtactaccgcctgggattcagcggcggcggcggcggcggcggagcctacgcgacgtacaccaacggcagcctcgccgtgttcgctgctgcggcgcctgctcccacgccgctggccaccatccagctccccgccgtcggcgccggtacggtgcagtacatgcggctggagcacgacggccacctccgggtgtacgagtggagctccgcggggtgggcgccggtgttcgacgtcctgcgcctcttcccggacgactgcgcgttcccgacggtgtgcggcgcctacggcgtgtgcacggacatgcagtgtagctgccccgacgcggccaacttccgggcggtggacttccggaggcccaaccgcggctgcgtcacggtggcgccggttgccggctgcggcggttcgcaccccccggcgcggctggtgtcgctgcccgggctggcctacttcaacgaccccgccaccagcctcagggcgctggagagggtgagcgacgccgcgtgcaggaaggcgtgcctggacgactgcgcctgcgcggcggcgcagttcgtctacggcaccgacgccggcgacggcttctgctacctgcagtcggaggtgctgtcgctggagacgtcgcggccggaggtggtgcactacaactccaccatgcatctcaaggtgcgggccacgcggcgtccgtcaccgtcagccagattttagttggattggaccactcacaaggacaaggtcacacacagccacacagagcagtacaccacttctatattatcagtctgttgtcttccaattttttttgtatcagtctacagtccaaacacttgttgatccaccgatgtcaaaatgaagtccttttctttttctgtgtc

SEQ ID NO: 5016 - DNA, 1575 bp, Hordeum vulgare subsp. vulgare
gacagtgctccatccactatcacatcacgatcacgatcaagcagtcacggcccatgatgcaccgtgccacgatcatcgcgctgatcggctgccttctcgccggcggcggggttcgagcgcagcagcaggagcagcagaggtttgactacccggcggcgagggcgcccacgacctgggccaacacggacgccggcctgccgcaccacgtcgtctacaccgacggctccgtggcgcgcgtcgccctgctgcgcctcaacccggccggcttcggcccctccttcgccttcggcttcttctgcaccagcagccacggcgcggccccgtgcgccggcttcctcctcggcgtcgccgtcgtctactgcaacagcggcgcgctcatcacctccgtcacgaccggcgtcccgcaggtcgtctggtccgccaaccgcgccagccccgtgggcgagggcgcctccgcggagctcacgcctgagggtgagctggtgctcagatcggccaacgggtcggcggtgtggtccgccggcgccaagggccggtccgtcgccggggtgaccatcggcagcgacggcaacctggtgctgttcgacgggctcaacgccacggtgtggcagtcgttcgaccagcccacggacgcgctgctcgtcggccagtcgctgaagcacggcgcgcggctcaccgccaacgcgtcggcggctgactggcgcgacggcaggttctacctcaccgtcgaggacgacgccctgagcgcctacgtctacgccacgccgccgcagcgctatttccacctcggcttcggcgagaccgcggtcggcgcctacgcgacgtacgccaacgggagcctcacggtctccgcccggcccggagcgccgtcagtggccgtcatccagctgcccaccgtcgtggcgggcaccgtgcagtacatgcggctggagcacgacggccacctccggctctacgagtggcgctccggctcgggctgggcgccggtgttcgacgtgctgcgcctcttcccggacggcggctgcgcgtacccaacagtctgcggcgcgtacggcgtgtgcacggacgacacgcagtgcagctgccccgacgcggccaacttccgggcggtggacttccggaggcccaaccgcggctgcgtcccgacgagtccaccgccgacggcgtgcggctcctcgtcgtcgccggggcggcgcgcgcagcaccggctggtgtcgctgccgggcacgggctacttcaacgaccacgccacgagcatgcgggccgtggagcgggtgggcgaggaggcgtgcaagaaggcgtgcctggacgactgcgcgtgcgcggcggcgcagttctactacggccccaacgccggcgacgggttctgctacctgcagtcggaggtgttctcgatgcagacggtgcggcccgaggtggtgcactacaactccaccatgcacatcaaggtgcaggccgagtcagccaggatctgattactcccaccctgagcaccacgaattaagttctatggcatatatgttgaaattccaaagttgaccatgagaatgaaataatcttttctccattctccct

SEQ ID NO: 5017 - DNA, 1358 bp, Zea mays; identical to SEQ ID NO: 1133

SEQ ID NO: 5018 - DNA, 1421 bp, Oryza sativa Japonica Group; identical to SEQ ID NO: 4908

SEQ ID NO: 5019 - DNA, 1116 bp, Zea mays; identical to SEQ ID NO: 1134

SEQ ID NO: 5020 - DNA, 2315 bp, Zea mays
gccggagcagccttttgcctcgcccgcagcagatgagcagacgctgcagcagagcagccttttgcctcgcccgcagcagacgctgcagcagagcagccatggcgcctccgccgttctacctgcccctcctcctcgcctttctgctcctctccaccgctgccgcccactcccagcatctccacctccagcaccacggccacggtccccaccaccatcaccatgtctccccgtccatgacagccaccgcccgcttctacaccgcgccgtccatgcaccagaaccgcatggagtcggaggatgcccgccagtctctgcgcgtcttcagccccttcctcacccccgtggcagctcaggctccttctgccgaggaggccatgtcggcgatggtcgcagccgcggacgcgggggaccccgcgcgggcgcggctcgacccgccctcgccgccttcttccctactcgccgcgggcgatctgatgccgtcctccctcccgctgctgcagccacaagctgaggtggtggggtcgttcgagtcggagcccgcggctcctccttccgtcgtcgatgagcagtaccgcgacgaggcgagcccatcgcctccccctcccgccgtctacgagccgtaccgcgatgcggcgagcgctcctccttccgtcgttgacgagccgtacagcgacgcggcgagcccaccgcctccgcctttcgtcgtctacgaaccgtaccgcgacacggcgagcccaactcctcccgtcgtctacgagccgtacctcgacgcggcgagccctcctcctcctcctcccgtcgtctacgagctgtaccgcggcgtggcgagccctccgcctccttctcccgtcgtctacgagccgtaccgcgcggcgagcccccagtctcccgtccacgactacgctgcgggggtggtgtactcgggctcgggcgacgacctcggcctgcagcagatcgccaaggtgctcgcgtcgctggggtacaacgagatggcttcgtcggccacgctcctcgcaggctcggcttccgtcgctacatggcccgggccgattaccgtcttcgcggccccagacgtattcctccaggccgactcctgccccgagtccgagtgctcgcgacgccacctcctcctggaccacatggccctgggctacttcccctacgccgaactcgccgcggcgcccaccacgaagctcccatcggcctccgtcggcttctgcctcgacgtcgcggcccagccacagcgcgggcccttctccgtccaccacgccagcctgtacgtcgacggcgtcatggtgtcggaacctgagctatacgacgacggccgctacgtcgtgcacggcctccacggcttcatcccgccgctctcccgcgcctcctgcgccgaggacgcgcatgagcatcctcaccaccaagtccacctccaccagcaccgccgccaccaccacctcagcgccagatcgtcagccgcctccgctgcgatcgccgcctctgcagtgcgcgtcatgatccgcgaagccatatcccgcctgcgcgacggcggcttcggcttcgtggcgctggccatgcgcgtcaagttcgccgagctggagaagctgtccaacctcacggtgttcgcgctcaacgaccaggccatcttcaccggtgaaggccacggctacgtctcggcggtgcgcttccacatcgtccccgagcaccgcctcacccgcgccgacctcctgcgcctccgccccggcaccatacttcccaccctggccggcgaggaccaaaagctcgtcgtcaccctcggctccggctccgccaccgacgaggtccggatcaactacatacccgtgaaggaacctgacgtggtgatcaactcgcgcgtcgccgtccacggtgtctacgtcccgttcccccgcctccacctcgccaacctcgccacattggtggccgtcgcctccgacctgcagacgaacgacagctgtggcggcgccgggggacctttgggcgactgcgcctccaccccgatgacctctacgacgatctcagttgatcagggctacggcaaagggcagtgatgcgtgagcccgtccgttctcttcttctgagtttcttaccaactagtaggatttttgagcttcgcagtttgtttgttagatgagggatgaggttttggtagtcggatactcggatttatggatgtccgtgtcgttgcgtgatggaatgtgtaccgcacattcgcactgctgcatggtgaacgaattcttgatggaactttatgtggcgatgctgttttgcgcgctttgaaaaattactcatgctctgttcagttc

SEQ ID NO: 5021 - DNA, 1929 bp, Sorghum bicolor
atggcggctccgccgttccacctgcccctcctcctcgcctttctgctcctctccaccgccaccgccaccgccgccgcccactctcagcacctccatcaccacggccacggtccccatacccaccaccaccaccgctccccgtccatgatgacggccactgcccgcctcgacaccgcgccatccatgcaccagaaccgcatggagtcggagtcggaggagacccgccagtcgctgcgcgtcctcaaccccttcttcaccaccgtggccgcccaggctccctcgggcgaggacgccatggcggcgatgggcgcggccgcggacgccgcggacaccacgcggctcgaccttccctcgcctccccctcccctcctcgccgcggtggatccgatgccgtcctccctcgcgccgctgcagccgcaggctgaggaggcggggtcgtccgagtcggagcccgctgctcctcctcccgtcgtcgacgagccgtaccgcgacgcgacgagccctccgcttcctccacccgtcgtcgccgagccgttccgcgacgcgacgagccctccgcctcctcctctcgtcgtcgtcgagacgtaccgcgacgcgacgatccctccgcctcctctcgtcgtctacgaggcgtaccgcgacgcggcgagccctccacctcctcttcccgtcgtctacgagacgtaccgcgatgcggcgagccctccgcctccacctcccgtcgtcgacgagccgtaccgcgacgtggcgagccctccgcctcccgtccacgacgacgctgcgcgggtggtgtcctcgagcacgggcgacgacctcggcctgcagcagatcgccaaggtgctcgcgtcgctggggtacaacgagatggcttcgtcggccacgctcctcgccgacacggcgtccgtcgcggcatggcccggggcgatcaccgtcttcgcggcccccgatgccttcctccagcactcctgccctgagtgcttgcgaggccacctcctcctcgaccacatggccctgggctacttcccctacgccgagctcgctgccgcgcccgcgatgaagctcccgtcggcctccgtcggcttctgcctcgacgtcgccgcccagccacagcgcgggcccttctccgtccaccacgccagcctgtacgtcaacggcgtcatggtctcggaacctgagctctacgacgatggccgctacgtcgtgcacgggctccacggcttcatcccgccgctctcccacgcctcctgcgtcgacgacgacgacgcgcatgcacatcccaaccaccaagtccacctccaccagcaccgccgccaccaccacctcagcgccagatcggcagccacctcggccgcgaccgccgcctccgtcgtgcgcatcatgatccgcgaagccatatcccgcctccgcgacagcggcttcggcttcgtggcgctggccatgcgcgtcaagttcgccgagctggagaagctgtccaacctcacggtgttcgcgctcgacgaccaggtcatcttcaccggtggaggccacggctacgtctcggcggtgcgcttccacatcgtccccgggcaccgcctcacccgcgccgacctcctgctcctccgccccggcaccgtacttcccaccctggcgggcgaggaccagaagctcgtcatcaccctcggcgccggctccgccaccgacgaggtccggatcaactacatacccgtgaaggaaccagacgtggtgatcaactcgcgcgtcgccgtccacggcatctaccttccgttcccacgccttcacctcgccaacctcgccgcctcagtggccgtcgcctccgatctccagacgaacgacagctgcggcgtcgggggacccttcggcgactgcgcctccacaccgatgacctctgcgacgatcccagctgatccgggctacggcgatgggcagtga

SEQ ID NO: 5022 - DNA, 1909 bp, Sorghum bicolor; identical to SEQ ID NO: 4352

SEQ ID NO: 5023 - DNA, 2327 bp, Zea mays
ccggcacccgcggcgccggcgacgcagggaggaggcgatgcacggccggccgcggcgcccggccaagcctgaggacgacgaggcggcgtcagcgaaagccgccaagctccgggacctccaggcccaggtcctgcacaatcaccatgcccgcacgtacacaaaggagtcaattgggctgagcttcaagctgctcgagacaaatccagaggcctacacggcatggaactaccggaagcttgcgttgcagcacaatgtcaaggagctttctgacccacaggccatcaagtctgctattgatgatgagctgagagtggctgaggttgctttaaggcagaacccaaagtcctatggggcttggtatcaccggaagtggttgctaaaccaaaagctagcgcctgtggatttcaaatatgagcttggcctcttggataaactgttaaaggtggacgccaggaatttccatggatggaattaccgaaggttccttgcgagattcatgggtttgccagatgatgaggagcttaagtatacgatggataaaatcagtgacaacttcagtaattactcagcatggcataatcgtagtatacttctgtccaacctactaatccagcagagcaaaggttttgagtcaaagcagaagattttttccgaggagtttgaacttgttactcaagctctttttacagatccaagtgaccaaagtggatggttctatcacctctggcttttagctcaaacatctagtccagataacccacagctgattgcttcatggccttctaatgctgcaaagctcagtttctcttttatcaaggaaaaggctgagcagcacacactgtcatccgtctggtcaaggactgtacccattgttctttattttaatgagcctgtcaaaggattaaatcattcaagtgtgaacttaaagtctgatttggagttcggtaaggatatccaatggaggcccctcacaatggcagactctgggtactctaaatgttgggccacatatcttcaaattacaaatgaatgtagcagtttgcaggaatattctgttgaaatgagcataccctgctcggatgacattgtgtctagaagtggctctaactacaactgtcctgtgcattttacattttacattgaactgatcagcaacaacgcagcccagggtttagatacgtttgataagccagttgcctggaattgctcagactcattccagtctcatggaaaccgtgatcctatccctttggatctgctaaacattactagtgccttggtcgaacatgactcagattggcattttgaaaggctgtctgaggagatagatcttttcagagagttagctgatgacaatagcaagtttgggaagttgacattagcccggctattgcttgcttgtgctgctataaaatcccgtggaagatctctaattgaaaggaagggatactgtgaagaggcactggggctcttcactgacttgattcacctggatccatctcataagcagtactatgaggatgaacggagcttagccctgatggataagttaacatgtgacatggagactttcacgaagcattgttctgttcaggttcaaccaaattcagctcccctgcatcatgtgcagtttcgcagattgtctgtaacacgcatcggatttgctgagcgcctgttgtgggttcaaatgctggacctaagccataatagtcttagatcagtcgaaggtttggaggctttgcagcgccttgtgttcttgaacatcagcaacaaccagatcagtagtttcacagcacttgaaccccttacgaagataatctcactgaaagttctggatttgtcgttcaacgagattggagctcactcaattgacacagcacggtatatctgcccgtctccgttctcacacaaaactgaagcaagtgaagcttttgaagagtaccaggaggtaaataatatcaacgtgacggaatactgggacgccatattgttcttcagatctttgaagctggcacagcttgatatcagaggaaatgcagttgccagcaaggacggcttcagaactcttgtcgtgacgctcattccttgtctaaaatggtttgatggtgaaggtgtcagttaatcggtggagttccacttaggagttgggcaatcttggtagtgtcaaggctcactatgtgaactattttttgctagaagccattgatttgcttcatatgcagtgctgtatttgtttatgcgaatctgagacatgatcatgatgttacagagttctgaattttcaggattgaactgtcataggtcatacaagaaagaagatgttatct

SEQ ID NO: 5024 - DNA, 2080 bp, Zea mays
agctctcaaatcttcaatccattcggaaaggttcatccaccttcaggcagagcacagtcctcactcctcagtctacactccacactccacactccacacgcaagcacgcacggcgggcggcggtcgcccacctggacctggtaccggaacaccagagctcaaggtcggccatggattcgccactgctgagcacacccgctctgctggcgctgtccctgctccttctagcgctctacatcgctcgccggcgccgcggcggtggcaagaaccggaactaccctcccgtggcgggcaccgtgttccaccagctgctccacttcaggcggctgatggagtaccagacggagctcgcccacaggtaccgcacgttccgcatgctcaccccgacctgcaactacgtgtacaccgtggagcccgccaacgtggagtacatcctcaagaccaacttcggcaactacggcaagggggcgatgatccacgacgtgatggaggacctcctcggcgacggcatcttcaacgtggacggcgccaggtggcggcaccagcggaaggtggcgagccacgagttctccacgcgggtgctgcgcgactacagcagcggcgtgttccgcgacacggccgcggagctcgctgggatcgttgcggtggcggcgcggggcgccgggcccggggagaggccgctggacgtcgcggacctcctgatgcggtcgacgctggactccatgttcaaggtcgggttcggggtcgacctgggctcgctgtccggctgcggcgacgacgagggcgcggcggcgttcgccagggcgttcgacgacgccagcgagcaggtcctgtaccgcttcttcgacccgtcctggaaggtcaagaggctcctcggtgtctcgtcggagggggccatgaaggggtcgatccgcaccatcgatcaattcgtgtacggcgtcatcgacaggaagatcaagcagatgggcagggaccaagaattcgtgagcgagctctctgcagctgcctcgcccgtttggatgcacatgcattcacgggcgctcgattggcgctccggccatttcttctttttactgacacacacggacggtggtgtttgtctttggcaggccaagaaagaggacatcttgtcaaggttcctgatggagcgggagagcgaccccggctgcttcgacaacaagtacctgcgggacatcatcctcaacttcgtgatcgccggccgcgacaccacggcgggcaccctgtcgtggttcctctacgtgctctgcaggaaccagcacgtccaggacagggtcgcgcgggaggtgcgtgccgccgccacgggcgaccgcgacgacgtcggcgtgcaggagttcgtcacgtgcttaaccgaggacgccatcagcaggatgcggtacctgcacgcggtgcttaccgagacgctccggctgtacccggctgtgcccatcgatgtgaagtattgcttttcggatgacacgttaccggacggctacgctgtcaagaaaggtgacatggtgaactaccagccgtaccaaatgggcaggatgaagttcctgtggggcgcggacgccgaggagttcaggccagagaggtggatcaacgacgacggcgtgttcgtcaacgagagccccttcaagttcacggctttccaggcggggcctcgcgtctgcttgggaaaggagttcgcgtacaggcagatgaagatcttcgcagcggtgctggtctacgccttcaggtttgagatgtgggaagccaatgctaccatgggctaccggcccatgctcacgctcaaaatggacggcccgctgtatgttcgggcatcgctccggcaatgaggtgtgggcgactgggcggcggccacgaagtcaaaatacgttgcgtactgttatgatactatcttagatattaaacttgttaaaataaatattttattttatcttagctaaaagactgaaaataatacgagttgaagagaaactcaacctttttgttatagctcgctcgatctctcgtcatctttcaactagcgaaatggtattatatgaaagtgttgtactatgtaaaaaaaaaaaaaaaaaaa

SEQ ID NO: 5025 - DNA, 2080 bp, Zea mays; identical to SEQ ID NO: 1135

SEQ ID NO: 5026 - DNA, 2167 bp, Zea mays
atccatctcactagctaagccagcagccacagccacagacatagcaaccacacgctcttcgatccgtcatcagccagcgcgcgcctcgatctccttcgattcaatcgtttgacattgatatggcgttcgctgaggaggagacgacgaggtaccttggcacgaacctcatcgagagctgcggcgactcggaggacgggctcaccggctgggctccgtccggctcgtgcacgctctccgcgcacgccgacgaggacgcgtctcttccttcgctggcagccgcattgtccgccgccgccggcgacgaggactctgacgaggacgaattccagcagcgcgcgccgaggcccagcggccggtacgtcctggccgcgcgccgcgcgagcgacaaggacgggctatgccgcgcggtctcgcgcgcgccgatcaggcccaacgtaacgtaccgggtggccgggtgggtcggcctgggcgccgccgtggagggctcccacgccgttcacgtcgaggtccgcgtcgacggtggtggccgcccggtcggtggcggcgtggctgtggtcgagtcggggaagtggggccagatcaagggctcgttccgtgtcgacggcgatgagccaccgcgccacgccaaggtctacgttcacgggccgccggcaggggtggacctcaaggtcacgggcatgcaggtgtgcgcggtgaacaagattccgaggctgaggcacctcaggaagaaggccgacaaggtgcgcaagcgtgacgtggtcctcaaggtgagccggcggacgggcgtcgacgacgacacgacggcgagcgtcgccggggcgcacatccaggtggtccaggtccagaacagcgtccccatcggcagctgcatcaccaaggcgggcatgcagaacccggagtacgtggacttcttcaccaagcacttcgactgggccgtgctcgagaacgagctcaagtggtactacacggaggccgtgcgggggcaggtgagctacgccgacgccgacgagctcatcggcttctgcgaccgccacggcaagcccgtgcgcgggcactgcatcttctgggccgtggagaactcggtgcagccgtgggtccgcgcgctcagcgccgaccagctccgggcggccgtggaggcccggctgcggggcctcgtgtcgcgctacgcaggccggttcccgcactacgaggtgaacaacgagatgctccacggggcattctaccagcagcgcctcggcgacgacatcaacgcgcacatgttccgggagacggcgcagatcgacccggcgccggcgctgttcgtgaacgactacaacgtggagagcgccaacgaccccagcgccacgccggagaagtacgtggcgctggtcacggacctgcagaggcggggcgcgcccgtgggcgggatcggcgtccagggccacgtcacgcaccccgtcggggacatcatctgcgacgcgctggacaagctcgccgtcacggggctgcccatctggatcacggagctggacgtgtcggccgccgacgagtccgtgcgcgccgacgacctggagatcgttctgcgggaggcgttcgcgcacccggccgtcgagggcatcatgctctggggcttcatgcagggccacatgtggcgctcccacggccagctcgtcaacgccgacggcaagtacacccaggccggcaacatgttcgcgggcctccgccaggagtggacgtcgcacgcgcgggggaaggtggacagcaacggcaacttcaagttcagagggttccacggcacttaccaggtgctgcttacgacgcccgccggagaggtgaagaagcggacgttcgacgtacacaagggggatgcgccgctcgtgctggacatggatttctagcttttcagtacatcgtacacattggtcacccaccggttattacagttacgacaaggattattagtacgatctagaacttatatatttgtgtacaaattaagtgtggtatattgggattggtgtgatgcttagaaatatatagtagtgaagaaaaaataagaatctttagtcccggattgtgtagatgattggtactattgtactcggtatttattatgacagactgcagtaaataaacaaaaggattaccttttttccaccttggtttgtttaaaaaaaaaaaaaaaaaa

SEQ ID NO: 5027 - DNA, 2105 bp, Sorghum bicolor
ctcgccagcagccacagccacagaacaacacagcaagcaagcagcaaccacacggtcttcgacccgttagccagccagcgccccagtttctgcctcgttttgctagctcctgccgtgcctcaccttgatcaatcggttgatatggcgttcgctgaggaggagacgaagacgacgacggcggcggcggcggcgcaccgcggcaagaacctgatcgagagctcctgcgactcggaggacggctgcctcgccggctgggctccgtccggctcgtgcacgctatccgcgcacgccgaggacgcgccgcttccttcgctggcagccacattggctgccgccgccgccgacgacgactctgacgacgaggaagtccagcagcagcgtgcgcggaagcccagcgggcggtacgtcgtggccgcgcaccgcgcgagcgacacggacgggctctgccgcgctctctcgcgcgcgccgaggcccaaggtgacgtaccgggtggccgggtgggtcggcgtgggcaccgccgtggagggctcccacgccgttcacgtcgaggtccgcgtggacgacgatggccagggccagcacgtcggtggcggcgtggctgtggtcgagtcggggaagtggggcgagatcaagggctcgttccgggtcgatgacgacgatgagccgccgcgccacgccaaggtttacgttcacgggccgccggccggcgtggatctcaaggtcatggacctgctggtgtccccggtgaacaagattccaaggctcaggcacctcaggaagaaggccgacaaggtgcgcaagcgtgacgtggtcctgaaggtgaaccggcggacggacggcgacacgacggagagcgtcgccggagcgcacatccaggtgatccaggtccagaacagcgtccccatcgggacctgcatcaccaaggcgggcatgcagaacccggagtacgtggacttcttcaccaagcacttcgactgggccgtcctcgagaacgagctcaagtggtactacacggaggcggtgcaggggcaggtgagctacgccgacgccgacgagctcatcaacttctgcgaccggcacggcaagcccgtgcgcgggcactgcatcttctgggccgtggagagctcggtgcagccgtgggtccgcgcgctcaaccgcgaccagctccgcgccgccgtggaggcccggctccggggcctcgtgtcgcgctacagcgggcggttcccgcactacgaggtgaacaacgagatgctgcacggcgacttctacgcgcagcggctcggcgacgacgacattaacgcgcacatgttccgggagacggcgcggatcgacccggcgccggcgctgttcgtgaacgactacaacgtggagagcggcaacgacccgaacgcgacgccggagaagtacgtggcgctggtgacggacctgcagcggcggggcgcgccggtgggcgggatcggcgtgcagggccacgtgacgcacccggtcggggacatcatctgcgacgcgctggacaagctcgccgtcacgggcctgccggtctggatcacggagctggacgtgtcggccgccgacgagtccgtgcgcgccgacgacctggagatcgtgctgcgggaggcgtacgcgcacccggccgtggaggggatcatgctgtgggggttcatgcagggacacatgtggcgctcccacggccagctcgtcaacgccgacggcaagtacacccaggccgggaacatgttcgcgggcctccgccgggagtggacgtcccacgcgcgcgggaaggtggacggcaacggcaacttcaagttcagagggttccacggcacgtaccaggtgctgcttacgacggccgccggggaggtcaagaagcgcaccttcgacgtcaacaagggggacgcgccgctcgtgctggacatggatttctaagctttgtattacaacgtacgtacacattggttggatcacgatttattacgacaaggattagtacgatcatgtagtagtacttatatattcgtacagattaagtgtggtatatattgggattggggtgatgcgtagacattccagtggtgaagaaagtatgatgaatgttaagtcccgga

SEQ ID NO: 5028 - DNA, 1415 bp, Zea mays; identical to SEQ ID NO: 1136

SEQ ID NO: 5029 - DNA, 1384 bp, Zea mays
gcccgcgcccgatcgggcgcactgccctgtggtgtactggtgtgtcacgcccctcgtcactcaccccgtcacccgcaaccccatcttctattcttcccgacggcgctcctggcagcaggaacaagatgtccaatagggccacacattggtgttatgcctgtcggcggccaattcgtctccgtgggcaggatatcgcatgccccaactgcaatgatggttttatccaggaaattagtgagatgggtggcatattgaacacttatgggctaattgaaccagactttgaagagcgtcgagctagaagattcggaatgatggatgccatgtcttcccttatgcggcaacggatggaagaaatgggaagagatggtttgtttgatattcgtggtagacaaggaacaggtactgaatatggaaggaggccaactgctgttcctacattggtatttggcggcatcccttctcctggagttgatagcggtgatgttaatgttgtcctcaggggaggccgcagagttggcgctgcccaaccaaatttcagtagtttagttgttggtcccagtctggaagccctttttgagcagctacttctccagaacaaccgtcaaggcccagcacctgctccacagtcagctattgactccatgcctgtggtaaagataaaccgcaggcatcttgacgacgatccacagtgcgcagtttgcaaagacaaattcgaggttggagcagaggcacgggagatgccatgcaagcacctgtaccatactgactgcatcatcccctggctggttcagcacaattcttgccctgtttgccgccatccactgccatcacagagatcaggcagtaccagtagcgcccggccttcagcttactacaacgaagccgctgatcctcctggggtcaccagagcagatcttgaacctgctccaagagacggtggcagggaaagccaggaaaggcgccgctccttctcgtttctgtggccgtttgggcccgtcgagttccagatccatttcttaccagtacgaacagaatgttgatgagcctgcagtatacgatccaaaccagatagcatattctgagtggcactatgaccactgactgaaaccctgcagcaatcgcaagctatctgcaattcgtgccttcaaccctcagctttggagaggcattcatcagctgtaatggctgcttgccgtataaaaaaaggatggttcttgcctgttatattgtgttcagtgcatagccttgctccgtatgtccgtcgtatatataatcccttgcgtgtagtaagcgatgaactgaatgcatccagaatatcatgtcatgataaacttgaatatagtttcatggttgttatttccaaaaaaaaaaaaaaaaaaaa

SEQ ID NO: 5030 - DNA, 1508 bp, Zea mays
actccccgcgccacgcgcctgactgggtgcactgcactggtggtgtgcacgcccctcgtcagtcgtcactcactcgctaccccatatcccattccccccgacggcgcctctggcagcaaggaacaatatgtccaatagggccacccattggtgttatgcctgtcagcgcccaattcgtcttcgcgggcaggatatcatatgtcccaactgcagtgatggttttatccaagaaatcagtgagatgggtggcgtactgaacacttatgggctaactgaaccggactttgaagagcgccaggccagaagatttggaatgatggatgccatatcttccctcatgcggcaacggctgtcagaaataggaagggatagtttgtttgatattcacggtagacaagggacaggtactgaatatggaaggaggtcaactgctattcctacgctggtatttggtggcatcccttctcctgcagttggtagcagtgatgtcaatgttgtcatcagggaaggccgcagagctggcgctgcccgtccgaatttcagtagcttagttgttggtcccagtctggaagctctatttgagcagctactactccagaacaaccgtcaaggcccaccacctgctccacagtcagctattgactccatgcctgtggtaaagataaatcgcaggcatcttgacgaagatccacagtgtgcagtttgcaaagacaaattcgaggttggagcagaggcgcgggagatgccgtgcaagcacttgtaccatactgactgcatcatcccctggctggttcagcacaactcctgccctgtttgccgtcatccgctgccatcacagcgatcaggcagtagtaccagcagcgcccgtgtgccttcagcatactacaacgaaacagctgatcctcctgcggtcgccagggcagatttggatcctgtgccttcagcatactacaacgaaacagcggatcctcctgcggtcaccagagcatatttcgatcctgctccaggaaactacggcagcgaaagccaggaaagtcacgaccccttctcctttctctggccatttggcccgtcgagttcttaccaatatgaagaaaatgttgatgaacctgcagtatacgatccaaaccatatagcatattctgcatggcactatgaccactgactgaaaccctgagttaaagtcaagatatctgcaattcgtgccttgagctctcagctttggtgaggcaaagggctgcttgccgtataaaaaatggatggttattgtgttcagtgcatacccttgctacgcatgtccgttgtggagatatcagctgtgtatagaactgggcgcaacaaactctgctgtaatgcccgtatatattccttttcggtatatcaagtctaaagctatagtgcataagtgctgtaatcggtgaactgagtgcatccagaatatcatgtcatggtaaacataattataattacatggttgtctttttagactgaaaaaaaaaaaaaaaaaa

SEQ ID NO: 5031 - DNA, 1485 bp, Zea mays
cacgcgcctgactgggtgcactgcactggtggtgtgcacgcccctcgtcagtcgtcactcactcgctaccccatatcccattccccccgacggcgcctctggcagcaaggaacaatatgtccaatagggccacccattggtgttatgcctgtcagcgcccaattcgtcttcgcgggcaggatatcatatgtcccaactgcagtgatggttttatccaagaaatcagtgagatgggtggcgtactgaacacttatgggctaactgaaccggactttgaagagcgccaggccagaagatttggaatgatggatgccatatcttccctcatgcggcaacggctgtcagaaataggaagggatagtttgtttgatattcacggtagacaagggacaggtactgaatatggaaggaggtcaactgctattcctacgctggtatttggtggcatcccttctcctgcagttggtagcagtgatatcaatgttgtcatcagggaaggccgcagagctggcgctgcccgtccgaatttcagtagcttagttgttggtcccagtctggaagctctatttgagcagctactactccagaacaaccgtcaaggcccaccacctgctccacagtcagctattgactccatgcctgtggtaaagataaatcgcaggcatcttgacgaagatccacagtgtgcagtttgcaaagacaaattcgaggttggagcagaggcgcgggagatgccgtgcaagcacttgtaccatactgactgcatcatcccctggctggttcagcacaattcctgccctgtttgccgtcatccgctgccatcacagcgatcaggcagtagtaccagcagcgcccgtgtgccttcagcatactacaacgaaacagcttgccctcctgcggtcgccagggcagatttcgatcctgtgccttcagcatactacaacgaaacagcaactgatcctcctgcggtcaccagagcagatttcgatcctgctccaggaaactacggcagcgaaagccaggaaagtcacgtccccttctcctttctctggccatttggcccgtcgagttcttaccaatatgaagaaaatgttgatgaacctgcagtatacgatccaaaccagatagcatattctgcgtggcactatgaccactgactgaaaccctgagttaaaatcaagatatctgcaattcgtgccttgagctctcagctttggtgaggcaaagggctgcttgccgtataaaaaatggatggttattgtgttcagtgcatacccttgctacgcatgtccgttgtggagatatcagctgtgtatagaactgggcgcaataaactctgctgtaatgcccgtatatattccttttcggtatatcaagtctaaagctacataatcctgtatgtgcagtaatcggtgaactgagtgcatccagaatatcatgtcatgataaacatgattataattacatggttgtctttttagactg

SEQ ID NO: 5032 - DNA, 2023 bp, Zea mays; identical to SEQ ID NO: 1101

SEQ ID NO: 5033 - DNA, 2287 bp, Sorghum bicolor
atggcggccaccacgtccacgacggcggccgtctccttctccctcccctcgcccccgcatcgccgtggggcccggcgccgccgcgcgccttccctcctccatgccgcctccaccaccgcagccctctcccccgacctctccatccagctctcaccccgcgactccccgcccgcgtcgaccaacggcgccgccaccgcgcttggaccccccgttgccgcctccttcgcccgtgaccgcgccgaggacctgcaggccgaggcccgcgccatggttcgcgccgctggcgccacagtctacagccccgagctcctcgccgcccgctacggctcccgccccttcaaggtggcgctgcgggcagcggaggtgctgtccaagctggcgtcgttcggggtgaaggtcctgctggacgagcggaaaggggagtcgtcctcggagaggaggcgcgccagggcggtggagctgcgcaccatcctcaccaggctcggcccaaccttcgtcaaaattgggcagggcctgtccacgcgccctgacctctgcccggccgagtacctcgaggagctcgccgagctgcaggattcacttcccacatttccagatgaagaagcatttgcatgtattgagagagagcttggcttcgcgcttgattcaatctactcaacaatttcaccttcccccattgcagctgctagtttaggtcaagtttataaagcacggttgaaatactctgggaagctggtagctgtgaaggtgcagaggcccggtattgaggatgccattgggcttgatttttatctacttagaggacttggctttcttataaataagtatattgacattgtaaccagcgatgttgttgctctaatggatgaatttgctcgaagagttttccaagagcttaattatgttcaggaaggccaaaatgcaagaaggtttaaaaaattatatgccgataagcaagatgtattagtgcctgatatattttgggattacacaagtgcaaaggttctaacaatggagtggattgagggtgtaaaattaaaccaacaagcagttattgaaagtcaaggattgaaggttctggatttggtcaacattggtatccaatgtagcttgaggcagcttctggagtatggttactttcatgctgatcctcatcctggtaatatattagcaacacctgaggggaagctggcttttcttgattttggcatgatgagtgaaacaccagaggatgcgagggtagccattataggacatgttgtccacttagtcaacagggactatgaagcaatggctcgtgattattatgcactagatttcttggaacccgatgtagatgtttccccgattgtgcctgctctcaagaatttctttgatgatgcactaaatgcaacagtgagtgagctcaacttcaagacaatagttgatggcctaggtgctgttctctatcagtacccattcaatgtaccagcatactatgcattgatactgcggtctctcaccgtactggaaggtttagcactctatgctgaccctgattttaaggtgcttgctgcatcatatccttactttgcgaaaaggctactcactgatcccaatccatatctcagagatgctttaattgagcttctattcaaggatggaagattcagatggaataggcttgaaaatcttcttgttcaagggcgccaagatagagagtttgcagccaaagatgcactgcagcctgttctaaagcttctccttggtcctgatggggaggaactgcgtgtgttagttgtgaaagaggcagttcgtgtaacagaagccatcactattggaacactgatcgattcatacaatgctgctccagcatttttgaagccactaatttccagtggcaatccggctggaccctttaagtttagtgaggctgaacaagaacagatgatggacctccgagaccaggttttcagagtatggggtcttctgagatcctcaaataactttgatccgagccttttgcaaccaatcgttcaggtgctacaagaaccagaagcccgtgtcttgggttctcgtgtcgcaggtggtgtaacacagcgccttgcagcacgtctgttgcaacagcttctcaggaccccacctgctcctggatctccttagcagatatatggataggctcgtgaagcatgtaaattgacacgacacttttcacagaaaatgagaaggaagcacaactcagaatcaattggatcgtaggaaattttcctgatccttagtcttttctgtggaaatagaactgattgct

SEQ ID NO: 5034 - DNA, 2363 bp, Zea mays
gtagtcacccccaaagctccgcctacgcacctcttcccactcgcccggccgcggctatggcggccaccacgtccacaacgccggccgtctccttctccctcccctcgcccccgcaccgccaaggggccccgcgccgccgcgcgcctttcctcctccgtgccgcctccaccgcggcgcccccctcccccgacctctccatccagctctcgccccgcgcgtccccgcccgcgtcgacaaacggcgccgccaccgcgcttggacgccccgtggccgcctccttcgcccgtgaccgcgccgaggacctgcaggccgaggcccgcgccatggcccgcgccgccggcgccacagtctacagccccgagctcctcgcctcccgctacggctcccgccccttcaaggtggcgctccgggcagcggaggtgctgtccaagctggcgtcgttcggggtgaaggtcctgctggacgagcggagaggggagtcgtcctcggagaggagacgcgccagagcggtggagttgcgcagcatcctcaccagactgggcccagccttcgtcaaaattgggcagggtctgtccacacgccccgacctctgcccggtcgagtacctcgaggagctcgccgagctgcaggattcacttcccacatttccggatgaggatgcatttgcatgtattgagagagagcttggcttcacgcttgattcaatctactcggcaatttcaccttcccccattgcagccgctagtttaggtcaagtttataaagcaaagttgaaatactctgggaagctggtggctgtgaaggtgcagagacccggtatcgaggatgctattgggcttgatttttatctacttagaggactcgggtttcttataaataagtatgttgacattgtaaccagcgatgttgttgcccttatggatgaatttgcacggagagttttccaagagcttaattatgttcaggaaggccaaaatgcaagaaggtttaaaaaactatatgccgataagcaagatgtcttagtgcctgatatattttgggattacacaagtgctaaggttctaacaatggagtggattgagggtgtaaaattaaaccaacaagcagctattgaaagtcaaggattgaaggttctggatttggtcaacattggtatccagtgtagcttgaggcagcttctggagtatggttactttcatgctgaccctcatcctggtaatatattggcaacacctgaggggaagctggcttttcttgattttggcatgatgagtgaaacaccagaggatgcgagggtagccattataggacatgttgtccacttagtcaacagggactatgaagcaatggctcgtgattattatgcactagatttcttggaaccggatgtagatgtttccccgattgtgcctgctctcaagaatttctttgatgatgcactaaatgcaacagtgagtgagctgaacttcaagacaatagttgatggcctaggtgctgttctctatcagtacccgttcaatgtaccagcatactatgcattgatactacgatcgctcactgtactggaaggtttagcactctatgctgaccctgattttaaggtgcttgctgcatcgtatccttactttgcgaaaaggctactcactgatcccaatccatacctcagagacgctttagttgagcttctattcaaggatggaagattcagatggaataggcttgaaaatcttcttgttcaagggcgccaagatagagagtttgcagccaaagatgcattacagcctgttctaaagcttctcctgggtcctgatggggaggaattgcgtgtgttggttgtgaaagaggcagttcgtgtaacagaagccatcactattggaacactgatcgattcatacaatgcagctccagcgtttttgaagccattaatttccagtggcaatccagccggacccttcaagtttagtgaggctgaacaagaacagatgttggagctccgagaccaggttttcagagtatggggtcttttgagatcctcaaataactttgatccgagccttttgcaaccaatcgttcaggtgctacaagaaccagaggcccgcgtcttgggttctcgtgtcgcaggtggtgtaacacagcgccttgcggcacgtctgctgcaacagcttctcaggatcccttctcctggatcttcgtaacagattatatagagatgggctcgtatgaagcatgtaaattgacacgatacttttgacaggaaactgaggtgccatttgattcaagaaatgtaaatatagatatgggctcgtatgaagcatgtaaattgacacgatacttttcacaggaaacaggatgtcatttgattc

SEQ ID NO: 5035 - DNA, 2443 bp, Zea mays
caccaaaatgtaagaacacacgcccggcgctgtggacgcctacgctactagtcagtactcggtagtcacccccaaagctccgcctccgcacctcttcccactcgcccggccgcggctatggcggccaccacgtccacgacgccggccgtctccttctccctcccctcgcccccgcaccgccaaggggccccgcgccgccgcgcgcctttcctcctccgtgccgcctccaccgcggcgcccccctcccccgacctctccatccagctctcgccccgcgcgtccccgcccgcgtcgacaaacggcgccgccaccgcgcttggacgccccgtggccgcctccttcgcccgtgaccgcgccgaagacctgcaggccgaggcccgcgccatggcccgcgccgccggcgccacagtctacagccccgagctcctcgcctcccgttacggttcccgccccttcaaggtggcgctccgggcagcggaggtgctgtccaagctgacgtcgttcggggtgaaggtcctgctggacgagcggagaggggagtcgtcctcggagaggagacgcgccagagcggtggagttgcgcagcatcctcaccagactgggcccaaccttcgtcaaaattgggcagggtctgtccacacgccccgacctctgcccggtcgagtacctcgaggagctcgccgagctgcaggattcacttcccacatttccggatgaggatgcatttgcatgtattgagagagagcttggcttcacgcttgattcaatctactcgtcaatttcaccttcccccattgcagccgctagtttaggtcaagtttataaagcacagttgaaatactctgggaagctggtagctgtgaaggtgcagagacctggtatcgaggatgctattgggcttgatttttatctacttagaggactcgggtttcttataaataagtatgttgacattgtaaccagcgatgttgttgcccttatggatgaatttgcacggagagttttccaagagcttaattatgttcaggaaggccaaaatgcaagaaggtttaaaaaactatatgccgataagcaagatatcttagtgcctgatatattttgggattacacaagtgctaaggttctaacaatggagtggattgagggtgtaaaattaaaccaacaagcagctattgaaagtcaaggattgaaggttctggatttggtcaacattggtatccagtgtagcttgaggcagcttctggagtatggttactttcatgctgaccctcatcctggtaatatattggcaacacctgaggggaagctggcttttcttgattttggcatgatgagtgaaacaccagaggatgcgagggtagccattataggacatgttgtccacttagtcaacagggactatgaagcaatggctcgtgattattatgcactagatttcttgggaccggatgtagatgtttccccgattgtgcctgctctcaagaatttctttgatgatgcactaaatgcaacagtgagtgagctgaacttcaagacaatagttgatggcctaggtgctgttctctatcagtacccgttcaatgtaccggcatactatgcattgatactacgatcgctcactgtactggaaggtttagcactctatgctgaccctgattttaaggtgcttgctgcatcgtatccttactttgcgaaaaggctactcactgatcccaatccatacctcagagacgctttagttgagcttctattcaaggatggaagattcagatggaataggcttgaaaatcttcttgttcaagggcgccaagatagagagtttgcagccaaagatgcattacagcctgttctaaagcttctcctgggtcctgatggggaggaattgcgtgtgttggttgtgaaagaggcagttcgtgtaacagaagccatcactattggaacactgatcgattcatacaatgcatctccagcgtttttgaagccattaatttccagtggcaatccagccggacccttcaagtttagtgaggctgaacaagaacagatgttggagctccgagaccaggttttcagagtatggggtcttttgagatcctcaaataactttgatccgagccttttgcaaccaatcgttcaggtgctacaagaaccagaggcccgcgtcttgggttctcgtgtcgcaggtggtgtaacacagcgccttgcggcacgtctgctgcaacagcttctcaggatcccttctcctggatcttcgtaacagattatatagagatgggctcgtatgaagcatgtaaattgacacgatacttttgacaggaaactgaggtgccatttgattcaagaaatgtaaatatagatatgggctcgtatgaagcatgtaaattgacacgatacttttcacaggaaacaggatttcatttgattcatgaaaaaaaaaaaaaaaa

SEQ ID NO: 5036 - DNA, 2222 bp, Hordeum vulgare subsp. vulgare
ggacctcccatctccgcagtccgcaccccttcctccggcggccatggcggcctccacgtcagcgacggccgccgtgtccttctctcttccgtcgtacccgcgccgcgggctgcgccgcctccgccgccgcccgtccctccgcgccgcctccactgcggcgcccccgtcccccgacctctccatccagctctctccccgcccttccccgcgctcctcgcctcccgtagtaccctccctcgcccgcgaccgggcagatgacctgcaggccgagtcccgcgccatgacccgagccgctgccgccaccgtctacacccccgagctactcgcctcccgctacggctcccaacctttccaggtggcgctgagagcggcggaggtgctctcgaagctgggggcattcgggctaacgctgctgctcgaccagcagaggggggagtcgtcctcatcagcgaagaggcgtgccagggcggtcgagctgcgaaccatactgacaaggcttggcccgacgttcgtcaagattggacaggggttgtccacgcggcctgatctctgcccgactgagtatcttgaggagctctccgagctgcaggattctcttcccacatttccagatgaagaggcatttgcctgtatcgagtgggagcttggcttccctcttgattcaatgtactcagcaatgtcaccttcgccgatagctgcagctagtttaggtcaagtttacaaggcacggttgaaatactccgagcagctggtagctgtcaaggtgcaaagacctggcatcgaggatgccataggccgtgatttttacctactgaggggacttggttttctaataaataagtatgtcgacattataactactgatgctgttgctctgatagatgaatttgcccgaagagttttccaagagcttaattatgtccaggaaggccaaaacgcacgaaggtttaaaaagttatatgctgacaagcaagacatattggtccctgatatattttgggattacacaagtgcaaaggtactgacaatggaatggattgagggtgtaaaacttaatcaacaagctgccattgaaggccaaggcttgaaggtcttggacttggtgaacattggtatccagtgtagcctaaggcagctactagagtatggttactttcatgctgacccgcatcctggtaatattttggcaacacctgaagggaagcttgcttttcttgattttggcatgatgagtgaaaccccagaggatgcaagggtagccatcatagggcatgtcgttcacatggtcaatcgggattatgaagcgatggctcgtgattattatgcacttgattttctgaaacctgaagtggatgtttctccaatcgtacctgccctcaagaatttttttgatgatgctttggattcaacagtgagtgagctaaactttaaaaccatagtggatggcttaggtgctgttctttatcagtacccattcaatgtaccggcctattatgcattgatactgcgatcactcactgtgctggaaggtctggcgctctatgctgatcctaattttaaggtgcttgctgcctcatatccttactttgctaaaagattactcacagatcccaatccatatctcagagatgctctgattgagctgctattcaaggatgaaaaattcaggtggaataggcttgaaaatcttcttgttcaaggacgccaggatagagagtttgtagcgaaggatgcgctacaaccggttttgaaacttctacttggtccagatggggagaatttaagggtgcttgttgtgaaagaagcggttcgtgtcacagaagccatcacctttggaacactgattggttcatacaatgcagctccagaatttttgaagccattaatatccaatggaaacccagctggaccctttaagataagtgatgttgagcgggaacaaatgttggagctacgagacactgttctcagaatatggggtcttttgagatcctctgatacctttgatccaagtcttttgcagccaattgtacaggtgctacaagagcgtgaagcccgtgtgtttggttctcgtatcgcaggaggtgtctcccagcgccttgcagctcgcttgttgcaacagctgctcaggatcccacctgcacctgttcctggatcttcttagaatctttgtagataggctcacactaaaccatgtaaattcacacgatactttctgcacc

SEQ ID NO: 5037 - DNA, 2453 bp, Populus trichocarpa
aaaataaaaatcaaagagttagtaatgtttggtcaaattaataaaaacggaaactgagaaattgaagtgcataggcagttaagaaaagtagaactgagtaggataggcataaagcgccaaagcgatgatgagctttgttgcagccggcagccagtgcttctgctcctcatcccttgccttgggtccccgtccaacttcagcctcaaggccaaagacaagaagagcaagggaagctcgagcagctgtagtggaagcgagaccaccaccagctccagctcgagtgattcgtcctgcagtgcgagatgcaaatttaatagtgggaggtgatcgaacggaagacctgcaggcggaggcaagagccatggcccgtgccgtcaacgcgtccgtctatagccccgaggttctggccgttcaatacggctctaggccaatcaaggtgttgcgaagaactcttgagatattgacaggattgggttcatttgggttgaaactattgctggacaaaaggaatggcgtgttcgatcagaagaagggtatacgagcagccgaactccggagaattttcacccggttgggccctacttttgttaaattagggcaggggttgtctaccaggcccgacatatgcccccctgagtatttagaggagctcgctgagcttcaggatgctttgcctacgttcccagacgctgaagcattttcgtgcattgagagagaattgggtctcccactcgactcgattttttcatccatttctccttctccaattgcagctgccagtttaggccaagtttacaaagctcaacttacttattctggacagactgttgctgtcaaggtgcaacgccctggtatcgaagaagctattggacttgacttttacctcattagaggactcggctttttcatcaacaaatatgtagacattattaccagtgatgttgttgctctcattgacgaattcgcacgcagagtttatcaagagctcaattatgtgcaggaggggcagaatgcaaggaggtttaagaaattgtatgctgacagggaagacatccttgttccagatatcttctgggattatacaagtggcaaggtgttgacaatggattgggttgatggagtcaaattaaatgaacaagatgctattgagagacaaggtttaaaggttctcgatctagtcaacacaggtatacaatgcagcctcagacagctacttgagtatggatactttcatgcagatcctcaccctggcaatctcctggcaacacccgagggaaagcttgcttttcttgattttggaatgatgagtgagaccccagaagaagcaagatttgcgataattggtcatgtggttcacatggttaatagggattacgaagccatggcccgtgattactatgctctagatttcttgtcacgggatgtagatgtgtctccaattgttccagcactgcgtaacttctttgatgacgcactcaattacactgtgagcgaactaaacttcaaaactctagtgaatggtctgggtgctgttttttatcagtatccgtttaatgttccagcttattatgctttgatattgaggtcactcactgtacttgaaggcctagccctttatgctgatcctaatttcaaggttctggctgcttcgtatccatattttgctaaaaggcttctcactgatccaaatccataccttagagatgctcttattgagttgctctttaaggatggtaggtttaggtggaatagacttgaaaacctacttgtccagggaagtaaagatagggacttctctgcaaatgatgccttacaacctgttttgaagctattattgggcccagatggcgaacagctccaaattttagttattaaggaggctgtccgtgtcactgaagctgtagtgatcggtacagtagttgatacgtacaattctatcccaaatgttgtgagggctttaatctttaatgccaatgtagctggacctcttacagtgagtgattctgaaattgatagcatgatggcgcttcgggaccaggttttcaggatatgggggcttctgcgatcctctcaagattttgatccggcccttttgcaacctatattacaggtgcttcaacagcctgaggcacgcagcctcggggagcgtgttataggtggcatcacacaacggcttgcagcacgattattacaacaagttcttcgagctccgaccacagtttctacttccatttcataaattgtttctaacaattggggtaagctatatgcatgtaattatatgcttggaatggaaaatattgattgatacatttcgaccattctttgatgaaaaaatatattttaggatcatttgaaatgagtatgcaaaaggagaaaagcctgtattcgtcaccacttgtaaactcctcaaagagggcccttggatattcatgcaagtgactgataataca

SEQ ID NO: 5038 - DNA, 2352 bp, Vitis vinifera
gtgaattgtgagttgccattcgcgaggactgtagagagagtcccaatttaatgtctattcttcctccaggccctttgcaatctcaatgtcaagaccagtccaacaatgcgatatcttcgtgggtttatcaatggtcatctcctccaccttggtgtgggtcgagggcaattaggatttcaaggccaaagggtgcttgtaaacgcagacaggcagtaatatctcaagcagcttccgtagaggcgctgcccgcacttgcagatgggagaggcagcaccgccatacaagtcttgcgaggggccagggatcgagccaacgatatgcaggccgaggccaaggctatggcccgtgccgctaatgcctccgtctacactcccgagcttgtttccaacaaataccgctctcgccctatcaaggtattgcggaggactatggaaattcttattggcgttggttcatttgccttgaaacttgtgctggaccaaagcaacgggcagctagatcaaaataaaagaattcgggcggttgatctgaggaagatttgcacgaaattgggcccaacttttgtgaagataggtcagggcttgtccacaaggcccgacctttgtccacctgagtatctcgaggagctctctcagttgcaggatgctttgccgacatttcctgatgcagaggcattttcatgcattgagaaggagttgggactcccacttgactccattttttcgtccatatctccatctccaattgctgcagccagtttaggtcaagtttacaaagcccaactaaagtattctggacaggtagtcgctgtaaaagtacaaagacctggcattgaagaagctattggacttgatttttacttactgagaggtctaggatttctcataaataagtatgttgacgtaatctccagtgatgttgttgctcttattgatgaatttgcacgcagagtttatcaagagctcaactatgtccaggaaggtcagaatgcaaggcggtttaagaagttgtatgctgacaagcaagatgttctcgtcccagatatcttttgggattacaccagtggcaaagtattgaccatggaatgggttgatggagtcaaattgaatgagcaagctgccattgagagacaagggctgaaggtcttggatctggtgaacacaggcatacagtgcagccttagacagctacttgagtatggatactttcatgcagatcctcatcctggtaatctcttggcaacacctgagggaaagcttgcttttcttgatttcggaatgatgagtgagacacctgaagaagcaagatttgcaataattggtcatgttgttcacatggttaatcgggattatgaagctatggctcgtgactattatgccctagactttttgtcacctgatgtggatgtttctccaattgtaccggcacttcagaacttctttgatggtgctcttaattcaacagtgagcgaactgaactttaaaaccatagtggatgggctgggtgctgtcttatatcaatatccatttaatgtcccggcatattatgcattaatattgaggtcgcttactgtactagaaggcttagcactttatgctgatcctaatttcaaggtgctggctgcatcatatccatattttgctaaaagactactcacggatcccaatccatatctcagagatgctcttattgaattgctttttaaggatgggaggttcagatggaatagacttgaaaacctacttgttcagggaagaaaagatagagatttctctgcaaaagatgctttacaaccagttctgaaattattactggctccagatggtgaacagctcagaattttagttattaaagaggctgtccgtgttactgaggctgttattctaggcacagtgattgatacatacaactctatccccaatcctatgaggactctaattgttagtggcaacactgctggacctcttatgatgagtgatactgaacaggaaaacatgataaagcttagagaccaagtctttaggatatggagacttctgcgatcctcagagaattttgatccagccctcttgcagcccattgtacaggtccttcaagaacctgacgcacgcagttttgggggccgcgttattggtgggataacccaacggtttgcagcgcgactattgcagcaagttctccgagcaccaccaacggttcctgcttcaactttatagcctttcaaaacattttggtgggtaagataatgtatacatgttgtaaatttgaagtcacaggaatgctttttgtagcacgcttacattctttgctctatcaattgcaattaaagaaagaatgtcactttgaaaaaaa

SEQ ID NO: 5039 - DNA, 3036 bp, Sorghum bicolor; identical to SEQ ID NO: 1138

SEQ ID NO: 5040 - DNA, 1688 bp, Sorghum bicolor; identical to SEQ ID NO: 1139

SEQ ID NO: 5041 - DNA, 1434 bp, Zea mays
agtctgtttctcccaatcctccacagtctctctctagagtagacccaggaaagaggcgatggatatggccattgacacgccatcgccggcgccgcccacgccgccggcgccatcggcagcggccgggcggcagacgcgtgcggcagaggcggtgcgtctggagcaccaactggtgcgcgtgcctctcgagtccctccgcgccaccgtccgctcgaaccaccgcctcgccgagaaggagatcgccgccgtcctctcctccgcctccgcggcccccgcagagagcagtgccgccgccgtcgaccacctcacctccctcgtctctcgcctccacggcctcaagcgcaagatggaggagggcgcacgagcggaggaactrcaggtgcagcggtgccgggcgcgtctggaccggctggcgactgccagcaccggcgacgatgccgagtgggaggacatgcggttgaagaggatcctggtcgattacatgcttcggatgtcctactacaattccgccaccaagctcgctgagacttctggtattcaggacctcgttgatattgatgtctttctcgatgcgaaaagagtaattgattctcttcagaataatgaagtttctcctgctttagcttggtgtgcagaaaacaagtctcggctaaagaaatcgaagagtaagcttgagtttttactgaggcttcaagagtttgtggagtttgtcaaggttaagaatttcattcaggctatagcatatgctcgaaaacaccttgctccctggggctctgtacacatgaaagaattgcagcgtgtcacagcaacattggtttttagaagcaatactaattgtactccatacaagatattgtttgagcaagaccgctgggactatcttgttgacattttcaagcaagatttttgcaagttatatggcatgacactagagccgctgctgaacatatatctgcaagcaggcctgacagctctcaagaccccgttctgctctgagggtagctgtcccaaagaagaccccttgtctctggagggcttcaggaaactagccgagcctctgcccttctctaaacagcaccactcgaagcttgtttgttacatcaccaaggagctcatggacactgagaacccgcctcaggttctgccgaacggctatgtctacagtgagaaggcgcttcaagagatgtccaagaaaaatgacggcaagattacatgccccaggacaggagatgtttatgacgtttcagagtgtgtcagggctttcatctcctaatcatgaaatactctgatttggtgtggctttgggaatctgagtgaatgtacatagagtggtcagcgcattgtgcgccatgtcgagttgattgaactaacctgcaatgttgaactggctggatgttggattgtgcgaaaaaaaaagaaaaaaaaaaawaaaaa

SEQ ID NO: 5042 - DNA, 1501 bp, Oryza sativa Japonica Group
cctccccccattctatcaccaagaaaagaggggaaaaaaaaagagagaaaaaaaaagagagagagaagagaggaagagatggagatggccatcgacacgccatcgccgtcgccgtcggcctcgtcggcggcggcggggaggcagacgcgcgcggcggagtcggtgcggctggagcaccagctgctgcgcgtccccctcgaggccctcaagtccaccgtgcgcaccaaccaccgcctcgccgagaaggagatcgccgccgtcctctcctccgccgccgccgcgccgggaggaggaggaggaggcagcggtgacgccgccgccgtcgaccacctcacctccctcgtctcccgcctccacggcctcaagcgcaagatggaggagggagcgcgggcggaggagctgcaggtgcagaggtgccgggcgcggctcaaccgtctcgcatcggcgagctctggcgatgatgctgagtgggaggaattgcggctcaagcggatcctggttgattacatgctgcggatgtcatactacgacaccgccgcgaatctcgcggagacttccggcattcaggaccttgttgacgttgatgtttttctcgatgcaaaaagagtaattgattctcttcagaacaaggaaatcgctcctgctttagcttggtgtgcagaaaacaggtctcggttaaagaaatcaaagagtaagcttgagttttttctgaggcttcaagagtttgtggaacttgtcaaggccaagaacttcatgcacgctatagcatatgctcgaaaatacctttctccctggggggctacacacatgaaagaattgcagcgcgtcacagcaacattggtttttagaagcagtacaaactgtgctccttacaaggtcctgtttgagcaaaatcagtgggacagccttgtggaccagtttaagcaggaattctgcaaattgtatggcatgacattggagccgttgctgaacatctatatgcaagcagggctcacagctctgaagacaccattctgcttcgatggtaactgccccaaagaagaccccttatccctgcctggcttccggaaactagcagagccgcttccattctccaagcagcaccattcaaagcttgtctgctacataaccaaggagctcatggacactgagaacccaccgctcgttttcccgaatggctatgtttatagcaccaaggctcttgatgagatggccaagaagaatggaggcaaggttacatgccctcggacaggagacatctgcaactacaccgatctcgtcaaggcctacatatcatgatcacacaacgcgtgtggatctcatctgggaagacactgatttgcgcgggtgatctgcaccctgaatgcttgtacatagactgatcagaacattctctattctgttaagtttagtctgaattgtgatgcaaatgcaagaaccattgaaactacttcagtactgatttctgattacactttgaccttttgtgtcattgcattcc

SEQ ID NO: 5043 - DNA, 1553 bp, Hordeum vulgare subsp. vulgare
gactcttctctgccggcctctttttatttattctccagcaaatccacaacccatcccccctgtttctcggtgtgagtcacagcagagcgagaggaagaaaaaaaaagaaagaaagatggagatggccatcgacacaccatcgccgtcgccgtccgtctcgccggctccgtcggcggcggcggggagacagacgcgcgcggcggagtcggtgcggctcgagcaccagctggtgcgcgtgcccctggaggccctcagggccaccgcccgcaccaaccaccgactcgccgagaaggagatcgccgccgtcctctcctcggcctcctcggcctccgttgcccccggagaaagcggctctgccgccgccgtcgaacacctcacctccctcgtctcccgcctccacggcctcaagcgcaagatggaggagggtgcgagggcggaggagctccaggtgcagaggtgtcgtgcgcggctggaccggctggctgccgccagcgccggtgacgacgccgagtgggaggacatacggctgaagcgcatcctagttgattacatgctccggatgtcctactacgacaccgccaccaagctcgcggaaacctctggcattcaggaccttgttgatattgatgtctttctagatgcaaaaagagtgattgattctcttcggaataaggaaatagctcctgctttagcttggtgtgcagaaaataaatcccggttaaagaaatcaaagagtaagcttgagtttttactgaggcttcaggagtttgtggaactagtcaaggctaagaacttcctgcaggctatatcatatgctcggaaataccttgctccctgggggtctacccacatgaaagaattgcagcgtgttacagcaacactggtttttagaagcaccacaaactgtgtttcttacaaggtcttatttgagcaaaatcagtgggattttcttgtggatcagtttaagcaagaattctacaaactatatggtatgacgcttgagccgttgctgaacatttacctgcaagcaggcctgacagctctcaagactccattctgcttcgaggggaactgccccaaagaagaccccttgtcgctggacggcttccggaaactcgcagagccgctgcccttctcaaagcagcaccactcgaagcttgtctgccacataaccaaggagctcatggacaccgagaatccaccgctcgtcctgcccaacggctacgtttatagcaccaaggcccttgatgagatggccaagaagaacgggggcaagatcacatgcccaaggacaggagaagtctgcaactacaccgagctcgtcaaggcttacatctcatgatcttggcgatgccgtcgtagctcgtcttgggtgatggatgattgatgagaattgccagtctgaatgtacatagaatgaatggatgatccgaacattgttgtgcggttaatttaagttgtagtgcaaagcaaaagaaccaaccgaaattgaaactgcagattgcgcttttccatcagttgattttcctgatcgaatgaatgaatttctgccg

SEQ ID NO: 5044 - DNA, 1341 bp, Zea mays; identical to SEQ ID NO: 1140

SEQ ID NO: 5045 - DNA, 1964 bp, Zea mays; identical to SEQ ID NO: 1150

SEQ ID NO: 5046 - DNA, 1757 bp, Sorghum bicolor
cgtttgtagcgcccctccttctcttcttccttcttccccgaggggagccgcgtcaaagcaaccaaacctgtgtgagctcccctctcccctcccttccccctcccctctctctctctctctcctcctcgtcctcgtcgattcctcgcaccatctcctatcctgtatccccgccgccgccaccgacggcgaatcggcggggcgccgccccgaatctccgccctccgcgctcagatctcccccctccgcgcttccggatgtcatgagccgcccccatttgcccaaggacccgaccttcccgcgcaccaatgggtccttggacggcggggcccgcggcctcggcgagatcgaggaggtgggcgctgcggccaccgtagccgtcgagcagtcgccgccctcgcagtcctcgtccccgtcggcgtcgtcgccgccggcggcgatgtcgtcgtgcgggcagtacatgctacaccgggtgcgcaagctggacaccctagcgggcgtcgccatcaagtacggtgtcgaggtagccgacattaaaaggctgaacggcctctcaactgacctccagatgtttgcacacaagacactgcggattccactcccggggaggcaccctccgtcgtcttaccaggagaatggttcatatgagagtgacgacagggaatgtactccacgccgcattcacgaagatatcttggattcaattttgaaaacaccaaagcccaaagtttcgccagctatgagtcttctgcagggatactatggccttgcaccacctccaaagagagatcaaacaagtgaaggcactgaaatggcagtttacagtaaaggcaaatctgcttttttggatgttgagccgtggctggagccaccaaattccgacccattccctcttcagaataggaaaaccagaagcttgatgataggttcttctcttgacggtgatactgatgagaatggtgacagtgaaaggttcataaggcggcgccagaaagctgatggtgagctgttaccgagggaggaaaatggtggtgactttctggcaagcgctggaaaaggcttggcactgaggccaaagtctagcaatcgaccagacatgaacaagagccagcagaatctttttgtgatggcggagcctttgtttgtcaatggtgtgcaaactgtaaggaaatcatccagcactccagagttccaggagccagagaccaacaccagttcatccatatggtcagcgagcaagtggagcataaatacagatgctttcgctcttcctctccccatccctcgttttgacaacattccaaagcccattgctgcttggagaaacaaggcggctcgcgactaataaactgctatatcttggctatgtgcttgatttttcctgaactcgaggcccagaaaagtgtccatgaaggagcttaccagtcttcacagctttggaagcatagcaggaccgcgattggctcctgctagttagaacattctgaagatcagacacatgtgtctagttggaacattctgaagatcagacgcatgtgtctatatgtttccagatggtatctagattaggtttacatgattctcatgttatattgggcttatgttgcgccaagagtagcaacgttaatatttggccatataaattatagatgctagatgacatagaggagacttgatatttgaggaggatattcttttgtacacaatgagataatgtagagcatcaaagggcggttatatatgtgttgtatgtgtgatcc

SEQ ID NO: 5047 - DNA, 1688 bp, Zea mays
gtcaaaggaaccaaacctgtgagagctcccctctcccctcccctcccctcccacccttcccttcctctctcctcgtcgattcctcgcactatctcctattctgcacccccagccgccggcaccgacggcgattccacggggcgccgcccccgaatctgcgccctccgcgcttagatctcccccctccgcgcttccggatgtcatgatccgcccccatttgcccaaggacccggccttcccgcgcaccaatgggtccttggacggcggggcccgcggcctcggcgagatcgaggaggtgggcgctgcggccaccgtagccgtcgaacagtccccctcgcagtcctcgtccccgtcggcgtcgtcgccggcggcggcgatgtcatcgtgcgggcagtacatgctacaccgggtgcgcaagctggacaccctagcgggcgtcgccatcaagtatggtgtcgaggtagccgacattaagaggctgaacggcctctcaactgatctccagatgtttgcacacaagacactgcggattccactcccagggaggcaccctccgtcgtcttaccagcagaatagttcatatgagagtgacgacagggaatgtactccacgtcgcattcatgatgatatcttggaatcaatattgaaaacaccaaattccaaagtttcgccagctatgagtcttctgcagggatactatggccttgaaccacctccaaagagagatcaaacaagtgagggcactgagatggcagttcacagtaaaggcaaatctgcttttttggatgttgagccgtggctggagccaccaaattccgaccccttccctcttcagaataggaaaaacagaagcttgatgataggttcttttcttgatggtggtactgatgagaacggtgacagtgaaaggttcataagacggcgccagaaagctgatggtgagctgttaccgagggaggaaaatggtggtgactttctggcaagcgttggaaaaggcttggctctgaggccaaagtctagcaatcgaccagacatgaacaagagccagcagaatctttttgcaatggcggagcctttgtttggcaatggtttgcaaactgtaaggaaatcatccagcactccggagttccaggagccagagaccaacaccagttcatccatatggtcagcgagcaagtggagcataaatacagatgcttttgctcttcctctcccgatccctcgttttgacaacattccaaagcccattgctgcttggagaaacaagccggctcgcgactaataaactgctacgcgcatgatttttcctgaactccaggaggcccagaaagcgggaagtgttcatgaaggagctttacattaggttggcaccagcctctacagctttggaagcagagcagagcaggactgtagtattggcccctgctagctagaacattccgaagatcagacgcatggcgtctatgtttccagacggcatctagactaggtttacatgattctcgtgttatattgggcatgttgcgccaagagtagcaacgttaatattcggtcatataaattatagatgctagatgacatagaggagatatatttgaggaggatatattttttttctgtacacaatgagaaaatgtagagcatcaaagggcggttatatatgtgttgtatgtgtgattccataccct

SEQ ID NO: 5048 - DNA, 1768 bp, Zea mays
acgtttctagcgtccccttcttccttcttccccgagccgcgtcaaaggaaccaaacctgtgagagctcccctctcccctcccctcccctcccacccttcccttcctctctcctcgtcgattcctcgcactatctcctattctgcacccccagccgccggcaccgacggcgattccacggggcgccgccccsgaatctgcgccctccgcgcttagatctcccccctccgcgcttccggatgtcatgatccgcccccatttgcccaaggacccggccttcccgcgcaccaatgggtccttggacggcggggcccgcggcytcggcgagatcgaggaggtgggcgctgcggccaccgtagccgtcgaacagtccccctcgcagtcctcgtccccgtcggcgtcgtcgccggcggcggcgatgtcatcgtgcgggcagtacatgctacaccgggtgcgcaagctggacaccctagcgggcgtcgccatcaagtatggtgtcgaggtagccgacattaagaggctgaacggcctctcaactgatctccagatgtttgcacacaagacmctgcggattccactcccagggaggcaccctccgtcgtcttaccagcagaatggttcttatgagagtgacgacagggaatgtactccacgtcgcattcatgatgatatcttggaatcaatattgaaaacaccaaattccaaagtttcgccagctatgagtcttctgcagggatactatggccttgaaccacctccaaagagagatcaaacaagtgagggcactgagatggcagttcacagtaaaggcaaatctgcttttttggatgttgagccgtggctggagccaccaaattccgaccccttccctcttcagaataggaaaaacagaagcttgatgataggttcttttcttgatggtggtactgatgagaacggtgacagtgaaaggttcataagacggcgccagaaagctgatggtgagctgttaccgagggaggaaaatggtggtgactttctggcaagcgttggaaaaggcttggctctgaggccaaagtctagcaatcgaccagacatgaacaagagccagcagaatctttttgcaatggcggagcctttgtttggcaatgatttgcaaactgtaaggaaatcatccagcactccggagttccaggagccagagaccaacaccagttcatccatatggtcagcgagcaagtggagcataaatacagatgcttttgctcttcctctcccgatccctcgttttgacaacattccaaagcccattgctgcttggagaaacaagccggctcgcgactaataaactgctacgcgcatgatttttcctgaactccaggaggcccagaaagcgggaagtgttcatgaaggagctttacattaggttggcaccagcctctacagctttggaagcagagcagagcaggactgtagtattggcccctgctagctagaacattccgaagatcagacgcatggcatctatgtttccagacggcatctggactaggtttacatgattctcgtgttatattgggcatgttgcgccaagagtagcaacgttaatattcggtcatataaattatagatgctagatgacatagaggagatatatttgaggaggatatattttttttctgtacacaatgagaaaatgtagagcatcaaagggcggttatatatgtgttgtatgtgtgattccataccctaatatagaggtggttggcttcgtttaaaaaaaaaaaaaaa

SEQ ID NO: 5049 - DNA, 1761 bp, Zea mays
atacgttcccacttctagcgcccccttgctccttcttccccgagccgcgtgcccgcgtcaagtaaccaaacctgtcataggctgatagctctcctctccactcctctttcctcgttgattcctcataccatctcctgcgccaccgacggcgaatccgcgtggcggcgccccgaatctgcgctctccgcgctcagatctcccgcctccgcgcttccggatgagccgcccccatttgcccaaggacccggccttcccgcgcaccaacgggtccttggacggcggggcccgcggccgcggcgagatcgaggaggttggcgctgcggccaccgtagacgtcgaacagtcccccctgcagtcctcgtctccgtcggcatcgtcgccaccggcggcgatgtcatcgtgcgggcaatacatgctacaccgggtgcgcaagctggacaccctagcgggcgttgccatcaagtacggtgtcgaggtagccgacattaagaggctgaacggcctctcagctgacctccagatgtttgctcacaagacactgcagattccactcccggggaggcatcctccgtcatcataccagcagaatggctcatatgagagtgacgacagggaatgtactccacaccgcattcacgatgatatcttggattcaatattgaaaacaccaaagcccaaagtttcgccagctatgagtcttctgcagggatactatggccttgcaccacctccaaagagagatcaaacaagcgaaggcactgagatggcagtttacagtaaaggcaaatctgcttttctggatgttgagccgtggctggagccgccaaattccgacccattccctctccagaataggaaaaccaaaagcttgacgataggttctcttgatggtgatactgatgagaatggtgacagtgaaaggttcgtaaggcggcgccagaaagctgatggtgagctgttaccgagggaggaaaatggcggtgactttctggcaagcgccggaaaaggcttggcactgaggccaaagtctagcagtcgaccagacatgaacaagagccagcagaatctttttgcaatggcggagcctttgtttggcagcggcgtgcaaactgtaaggaaatcatccagcactccagagttccaggagccagagaccagcaccagttcatccatatggtcagcaagcaagtggagcataaatacagatgcttttgctcttcctctccccatccctcgttttgacaacattccgaagcccattgctgcttggagaaacaaggcggctcgcgattaataaactgctatataatcttggttatgtgcatgatttttcctgaactccaggaggcccagaacgtgtaattaggttggcaccagcctttacagctttggaagcagagcagagcagagcaggaccgtaattggctcctgcgagctagaacattctgaagatcagacgcatgtcgtccatgtttccagatggtatctagattaggtttacatgattctcatgttatattgggcatgttgcgccaagagtagcaacgttaatattcggtcatataaattatagatgctagatgacatagaggagacttgatatttgcggagggtattcttttgtacacaatgagataatgtagagcatcaaaggaatccmcaatgagatatgtgttgtatgtgtgatcccatacccaaacatggaggaggattgctttatttaactacagattttgtttttcttcaaaaaaaaaaaaaaaa

SEQ ID NO: 5050 - DNA, 1732 bp, Oryza sativa Japonica Group
tctctcccctcccccctcctcctctttctctctcctccccttctcctctctctctccttccgctgattccgtcaccgcctctctcccgccgcccacgcggccaccggaacccgccgccggggacggcgaatccggggcggccccgccccgaatcggcgccgcccgctcccagatctcccaccccttccccgggggcgcctccgcatgtcatgagccgcccccatttgcccaaagacgaccacgccttcgccaatgggttcttgttcgacggcgtggcccgccgccccggcgagatcgaggaggcggccgccttcgccgccgccgccgacgtggccatcaccatagccgccgagcagtccgggtccccctcgtcgtccacggcgccgccgatgtcgtcgtgcgggcagtacatgctccaccgggtgggcaagctcgacaccctcgccgggatcgctatcaagtacggcgtcgaggtagcggacatcaagaggctgaatggcctatcaactgacctccagatgtttgcgcacaagacgctgcggattccgctccccgggaggcatcctccgtcgacttaccagcagaacggttcatatgagggtgatgacagggaatgtactcctccacgtcgccttcatgatgatatattggattcagttttgagaacaccaaagcacaaggcttcaccagccatgagccttctgcaggggtactatggtctcacaccacctccaaagaaggatacgacacatgaaggcacagaaatggcagtatatagaaaaggaaaatctgttttcttggatgatgacccatggtttggagagccgccagattccgacccattcccttttcaacataggaaaactagaagtcttgcaataggttcttctcttctgaatggcgagactgaggagaatggcgacagcgaaaagttgataaggcgacgccagaaagctgatggtgagttgttacctagggaagaaaatggtagtagtgctgtcctagcaagggctgggaaaggcctggcgttgaggcctaagtcgggcagtcgacaagatttgaacaagagccagcagaatctcattgcattggcggagccttctttcggtgatgggttgcatgctgtaaggaaatcgtcgagcactccggagttccaagagccagagagcaacagcagcagcaccagttcctccatatggtcgacaagcaagtggaccttaaaaccagacgctttcactctccctcttcccctccctctttttgacaacattccaaagccaatcgctgcttggagaaacaaggcggctcgagattagtagcttatagtctcttggttttgcacaactcctgttctaaagcaaggccctgtaagcaccccccggaggagcttcggttgacaacagctcttctgagagttggaagcagagcagaggaccttgtggaccttggttacttcttcctgggtggctggagcacaactcaggaagatcaaacacagagatggttcagagattagcttctgttttatggttcccttgttatattggagatgttgcaacgagtagcagcatcagtttcttcagttaagttatagatgacacagagccttggatactgagggtattcttttgtacacaaatgcagataaatgtagggatcgaaaggcggctatatatgttgtatgtgtgagaacttcgctgatatagaaaagtatcgtcattatttaccttcc

SEQ ID NO: 5051 - DNA, 1718 bp, Sorghum bicolor; identical to SEQ ID NO: 1141

SEQ ID NO: 5052 - DNA, 1395 bp, Zea mays
atggtgaacggcgagcagcgggcggacgcggagtgcacgcgggcgtcgctgctggggaggtatgagatcgggcggaccctcggcgagggcaacttcggcaaggtgaagtacgcgcgccacatcgccaccggcggccacttcgccatcaagatcctcgaccgcagcaagatcctctccctccgcatcgacgaccagatcaggagggagatcgggacgctcaagctgctcaagcacccgaatgtcgtccgcttgcacgaggttgctgccagtaaaacgaagatctacatggtgcttgagtttgtcaacggcggcgagctcttcgacaagatcgctatcaaggggaaactgtccgaacacgagggcaggaggctcttccagcagctaatcgacggcgtcagctattgccatgacagaggtgtctaccaccgagacctcaagccagagaatgtccttgttgatcggaagggcaccatcaagatctctgacttcggcctcagcgctctacctcaacatctcgggagtgacggacttctgcacacaacatgtggcagccccaactacatagctcctgaggttctgcaaaacagaggctatgacggctccttgtcagatctctggtcgtgtggggtgatcctctacgtgatgcttgttggctgccttcccttcgacgacaggaacctcgtcgttctttatcagaagattttcaagggagactgtcagatccccaagtggctttcgcctgccgcgcaggaccttctcaagaggatcctccaaccgaatccgatgaagaggatcaacgtcgcggggatcagggagcacgagtggttcaagaaggactacgtgcctgctgttccgcacgatgatgacgaagacgtccttcccagtccagctccctcgataaaggagccaatcgatgagccggcgcaggagaagtgtactcctatcaacgcttttcagttgatcgggatggcctcttcccttgacctttctggtttcttcgaggaagaggatgcagcgcaaagaaagattcggttcacttcgacgcacccacccaaggatctatttgacaagatcgagagcgttgtcatggagatgggattcaaagtccataggggggcaggcaagctcaaggtcttgaagaatagcaagtgttccaggaactccaggaacccgtcatcattgttggtgtgcaccgaggtgtttgagctcggtccatcattatatgtcgtagagcttaggaaatcccatggagactctatgttgtatagacagctgtgcgaaaggctctccgatgagctaggtgcctgcaagacagaccagatcgcgaggactgaatcatcgagtgacgacctctcgagcctcgatggcgaagcgttccctctatctgggttctga

SEQ ID NO: 5053 - DNA, 1753 bp, Zea mays
atagaagaagagcaggcaggagctataagtaccccgcccccttccaccctctccttccacctccctcccttgctgcctcatccattccagagctgcgaagacagacagacagagagaaagagggatcgacggagcaaggcggggccgtgtccggtcacacacgagcgagccctctcggccgcgcgtttgtgaatggtgaacggcgagcggcgggcggacgcggagtgcacgcgggcgtcgctgctggggaggtatgagatcgggcggaccctcggcgagggcaacttcggcaaggtgaagtacgcgcgccacatcgccagcggcggccacttcgccatcaagatcctcgaccgcagcaagatcctctccctccgcatcgacgaccagatcaggagggagatcgggacgctcaagctgctcaagcacccgaatgtcgtccgcttgcacgaggttgctgccagtaaaacgaagatctacatggtgcttgagtttgtcaacggcggcgagctcttcgacaagatcgctatcaaggggaaactgtccgaacacgagggcaggaggctcttccagcagctaatcgacggcgtcagctattgccatgacagaggtgtctaccaccgagacctcaagccagagaatgtccttgttgatcggaagggcaccatcaagatctctgacttcggcctcagcgctctacctcaacatctcgggagtgacggacttctgcacacaacatgtggcagccccaactacatagctcctgaggttctgcaaaacagaggctatgacggctccttgtcagatctctggtcgtgtggggtgatcctctacgtgatgcttgttggctgccttcccctcgacgacaggaacctcgtcgttctttatcagaagattttcaagggagactgtcagatccccaagtggctttcgcctgccgcgcaggaccttctcaagaggatcctccaaccgaatccgatgaagaggatcaacgtcgcggggatcagggagcacgagtggttcaagaaggactacgtgcctgctgttccgcacgatgatgacgaagacgtccttcctagtccagctccctcgataaagccaatcgatgagccggcgcaagagaagtgttctcctatcaacgcttttcagttgatcgggatggcctcttcccttgacctttctggtttcttcgaggaagaggatgcagcgcaaagaaagattcggttcacttcgacgcacccacccaaggatctatttgacaagatcgagagcgttgtcatggagatgggattcaaagtccataggggggcaggcaagctcaaggtcttgaagaatagcaagtgttccaggaacccgtcatcattgttggtgtgcaccgaggtgtttgagctcggtccatcattatatgtcgtagagcttaggaaatcccacggagactctacgttgtatagacagctgtgcgaaaggctctccgatgagctaggtgcctgcaagacagaccagatcgcgaggactgaatcatcgagtgacgacctctcgagcgtcgatggcgaagcgttccctctatctgggttctgatcatattgctttccctgtgttgttttgggaacaggggatgaggaacatgctcgttcctgatgcaattctagattaggatcatgaatatagtgtacaaagccagcggcggcggcggtgcaaattagccaccgggttgaatataaataatatatatatatgatcaaaaaaaaaaaaaaaa

SEQ ID NO: 5054 - DNA, 1785 bp, Oryza sativa Japonica Group
gttcattcctctccccccccccccctgaacccggccaactccggcgagagagacatagatagcgtgtgagacagtataaagatagagagggagaggtagttttttgttgccggcttgcggatttattgtaggagatcaggtcagtttcgttttcttgccggcgcggcgggcgtttgttgggtgcggcgggcggggaggagctcgtgaatggtgaacggagaggcggaggcggagtgcacgcgggcgtcgctgctggggaggtatgagatcgggcgcacgctcggggagggcaacttcggcaaggtcaagtacgcgcgccacctcgccaccggcgcccacttcgccatcaagatcctcgaccgcaacaagatcctctccctccgcttcgacgaccagataaggagggagattgggacgctcaagctgctcaagcaccccaacgtcgtccgcctgcacgaggtggctgctagcaaaactaagatttacatggtgcttgaatatgtcaatggaggcgagctctttgacaagattgccgtaaaaggaaaactctctgaacatgaaggaaggagacttttccagcagttaatcgatgctgtgagctattgccatgataaaggtgtctaccacagagaccttaagcccgaaaatgttcttgtggatcgaagaggcaatatcaagatctctgactttggcctaagtgctttgcctcaacatcttgggaatgatggattgctgcacacaacatgtggcagccccaattatattgctcctgaggttttgcagaaccgaggttacgatggctcattgtcagatatctggtcttgtggagtaattctctatgtaatgctcgtcggataccttccctttgatgaccgaaatcttgttgtcctgtaccagaagattttcaagggggacactcaaatcccaaagtggctttcacctagtgcacgggatcttcttcgaaggattcttgaaccgaacccgatgaagaggatcaacatagcagggatcaaagagcatgagtggtttcagaaggattacactcctgttgttccatatgacgacgatgatgacaattatcttgactcagttcttccaatcaaagagcaaattgatgaagcaaagcaggaaaagcctactcatatcaatgcttttcagttgattggaatggcttctgcccttgatctttcaggtttctttgaggaagaggatgcgtctcaaagaaagataaggttcacatcaacacattcaccaaaagatttattcgacaagattgagaatgttgtgacggagatgggattccaagtccagaggggtaatagcaagctaaaggtcatgaaaaatggcaggggttcaaagaacctcaggaatccatcatcattcttggtctgtactgaggtagtcgagctcgggccatccttatatgttgtcgaattgaagaaatcccatggagatcctatattgtatagacagctatgtgagaggctatcagatgagctaggagtgtgcaagacagagcagattcagaggacggagtcgctggaggatgatctagagagcttcgacagcggatcttctctgcctggtttttgaagaattgccgccctggatcattttggttagagttagaggaacatgctctgttcttcatacaagcgtaggttaggatgttgtatagtgtacaaagtgagtggtgcaagttagccaccgatgtttaatataaggattgctctcttcttgcccgtctgttggcccaattctttcccataatgaaatgaaatcatc

SEQ ID NO: 5055 - DNA, 1671 bp, Oryza sativa Japonica Group
gtcttccattatatttctctccccttccaacaaatcgtctcgagaaagaggaggaagaatcgatcttttggtggagtttgcaatggtgaagggagggagggaggcgctgctgggcgggtacgagatggggaggacgctcggggagggcaacttcggcaaggtgaagtacgcgcgccacctcgccaccggcggccacttcgccgtcaagatcctcgaccgcggccgcgtcgtctccctccgcgccggcgaccagattcgccgcgagatcgccacgctcaagctgctcaggcacccccacgtcgtccgcctccacgaggttgctgctagcaaaactaagatttacatggtgcttgagtttgtcaatggaggtgaactgtttgagagaattgcagtaaagggaaaactatcagagaaagaaggaaggaggctttttcagcagttaattgatggtgttagctattgccatgataggggagtctaccacagagacctcaagcctgagaacgttcttgtggaccaaaaaggcaacatcaagatctctgattttggtcttagtgctttacctcaacacctcgggaatgatggattgctgcatactacctgtggtagccccaactatattgctcctgaggttctgcagaataaaggatatgatggatccttgtcagatatctggtcttgcggagtaatcctttatgtaatgcttataggatatcttccgttcgatgaccgaaatattgttgttctgtatcagaagattttcaagggtgacactcagatcccaaagtggctttcacacagtgcacaaaatcttcttcggaggattcttgaacccaatccgatgaagaggatcgacatggcagggatcaaatcacacgaatggtttcagaaggactatattcctgttcttccatatgatgatgacgatgaagatgtacagtttggggcacgtcttcctgccaaagagcaaatcaatgatgagcctggagataagaattctcatcagatcaacgctttccagttgattggaatggcatcatcccttgatctttcagggtttttcgaggatgaggaagtgtcccaaaggaggattagattcacatcaacgcatccacccaaggatgccttcgacaagattgaaagctcagcgacggagttgggattccaagttcagagggggcacagcaagctcaaattaatgcgcaattgcaagggatcaaagaaccctgagtcatttatggtgtccgccgaggtttttgagcttggcccttctgtaaatgttgtagaacttaggaagtccaacggagaccctgcactgtatagacagctctgtgagaggatctccagtgacatgggggcgcgcaacacggagcagatcttcgcaacggcatcgcttgaggatgatcttcagaacagcaatgcagggacgccgctgttcgctttgtaacgaatgctgtgttctgcaaaactgcaatgttgtaggatgatcttaggcaagaggatgtgtaggaacatatttggtcaggcatttggagaagagataagacttgagagggtaggatcatagtagtatatgatacagtgtacagaaccgagtggttcaaaaactagccaccgttgtaaagagaaagaaaggaaagatgaaataaaagaaagaaataaattgccttg

SEQ ID NO: 5056 - DNA, 1764 bp, Hordeum vulgare subsp. vulgare
ggcatcgtcaatccgtcatccatcccaccacgcgcaacacgccctccggcccgacccgacccgccacgagcgcgtccctctccgggcagcagcgggcagcagaaagatggtggcgacgggcgacgcggaggacgcggcggcggggtgccgcgcgcgggcggcgctgctgggcgggtacgagctcgggcggacgctcggggaaggcaacttcggcaaggtgaagcacgcgcggcaccgcgccaccggggaccacttcgccgtcaagatcctcgaccgcggccgggtgctctccctccgcggcgccgacgaccaggtccgccgcgagatcgccacgctcaccatgctcgcccaccccaacgtcgtccgcctccacgaggttgctgctagcaaaacaaagatctatatggtgcttgagtttgtcaatggaggcgaactttttgacaggattgcaatgaagaaaaaactatctgaacgagaaggaaggaggctttttcagcagctaattgatggtgtgagctattgccatggaaagggtgtctaccacagagacctcaagcctgaaaacgttcttattgaccggaaaggcaacatcaagatctctgattttggtctcagtgctttaccacaacatctcgggaatgatggattgctgcatacaacctgtggtagccccaactatattgctcctgaggttctgcagaacagaggttacgacggatcattgtcggatatctggtcttgtggagtaattctttacataatgctcgtaggaaaccttccgtttgatgaccgaaatatggttgttctgtatcagaagattttcaagggtgacgctcagatcccggagtggctttctcccagtgcacaaaacctccttcgtaggattcttgaaccaaatccgaggaagaggattaacatggcagagataaaaatacacgaatggtttcagaaggactatattcctgttgctccatatgatgacgatgatgaagatgtacggcttggtgcaattctacctatcaaacagcaaattagtgaagcacccggcgacaagagcactcatcagatgaacgcttttcagctgatcggaatggcatcctccctcgatctttcaggtttatttgaggaagagggagtgtcccagagaaagatcaggttcacatcagcacaaccaccgaaggatttgttcgacaagattgaagtgtccgcgacacagtcggggttccatgtccagagagcgcatagcaagctcaaaataacgggaaactgcaatggaccgaacaaccccacaccattcttagtctgtgccgaggtgtttgagcttggcccctctcttcatgttgtggagcttaggaagtcccatggtgacactgcagtgtacagacagctctgcgacaggatctcgagtgacctgggaattgacaagattttgggatggggtcgctcttcgacgacaacctcccgagcttcgacagcagagccgcgacaccactggttgccttgtgatgagtgctgtgttgtaggtaccccaactgacatgatgttgtaggacgctaggaccatagctgtttattgattggaaatgacgatggtggtgtaaggattaggatcgtacagtgtacagaactacatacagataggggagtggtgaaactgactatgtatgaaggccatcatcctcagatgaaggggtgtgatagcggcacaacagtggttgagcgatgtaataatttttttgcgcaaaaaggccaaaggccttatatt

SEQ ID NO: 5057 - DNA, 1764 bp, Zea mays; identical to SEQ ID NO: 1142

SEQ ID NO: 5058 - DNA, 1486 bp, Zea mays
atgactcatgagagagggaggcggagttggaggcggagcatttaccggcggcagcctctgcctagtacactggagtcgctgcgaaacggagagacggagactcttggactggaggcatgatggaggcaaagcaggcggcgcccgaccggctctcctccctcccagcggagctgcaggacgagatcctcatccgcctcgacctcagggacgccgtgcgcacctccgcgctctcccgcacctggcgggacctctggaagtcgctctcggtgatctccctctccttccccttcggcacgcacccttccgtcgtcgacagcgtcctcctccgctacatcggcccccgcgtctctctcttccgcatctgtgtcgacgacgcatgtgccgaccgcatcgacgactggctcatcgcgctctcccgctaccgtgtcgagtccatcgacatgtgtggcacactcagatcactcggcaacttcaatctctactcctccatcttctccttaggtgatctcgtgtctctgctgctgaaaaactgccgcatcccacccctccccgtaggattccccggcttccccgcgctccagaagctagtcctcgcctatgttatcttcccatcgaacgggttcaaacaattggaggctatcattcgtcgctcacccttgcttcataccctgcatatgtttgacgtgttcatccctggtgaatacccagactcagtgatcgaggcgcccaatctccgtgtcctgtcaatctattcaccgtatgactatcgatggcgatttggagagctgtcgtgtctcgaatatgccaacattcatgtgttccactgtccgcagcatgaacatgattttggagttttccttgctcggtttgctcacgttcaaaaggctgtcgatgttaagatgccttatacacttccattcaccttttataacttgaagaaattgcagttatgtgtggatttcaatgaaattcactccattttgtccatgtttaccatgctaaggagctgtcacaaccttcaaaacttaaaaatagaggttcggagcaacagtggtagatgtggtagcaacattggttcgcttgaatgagacaagacccgcttttcctgcaccctgctgaagtgtttttttgtttgtctccatcatcacaatgatacacgaatcatgtagaaaatggcttatccagggaaccggcatgatttgtttgtcttgttgagaagaagctgatgtggtattagttgttcactagttcaatagggatatccgtggcagcaagcgcccagagtcgtttggtttttgcctgagtaggtgaaattcggacctccagaacttgttgcttgctgagctcgccatggagtgtttgtttctagctaaagttcttctctgtttggtgaaagctgctcccctttactttcatactcctgtttgttttgttgtccggttccagttaacgagctgaatctatttccacaaaaaaaaaaaaaaaa

SEQ ID NO: 5059 - DNA, 1230 bp, Sorghum bicolor
atggagccgaagcgggtgttggcagggcccgaccggctctcctccctcccggcggagctgcgggacgagatcctcgtccgcctcgacctccgggacgccgtgcgcacctccgtgctctcccgcacctggcgccacctctggaagtcgctctcggtactctccctctccttccccttcggcacgcacccctcggtcgtcgacagcgtcctcctcccctacatcggcccccgcgtctccctcttcgacatctgcgtcgacgacgagtctgccggccgcatcgacgattggttcgccgcgctctcccgctgccgcgtcgagtccatccacatgtgtggccgactcagatcaggctacttcaacctccactcctccatcttctccttcggtgatctcgtgtccctgcggttgcgatgctgcaacatcccacccctccccgtaggattcgctggcttccccacgctccaggagctcgacctcatctttgttgtcttcccagccaatggggacaaacagttggaggctatcattcgtcggtcacccttgcttcgtaccctggatatgtttgatgtatgcatctctgatgactacccagaatcagtgattgaggcgcccaatctccgtatcctatcaatctattcagagtatgactatggctggcgatttggagagctgccgtgcctcgaatatgccaacattgatctgttgttctgtccgcagcatgaacgtgattttggagatttccttgctcggtttgctcacgttcaaaagctcagtctcttctcgccggctgatgatgttaagatgccgtatacacttccattcaccttttataacttgaagaacttgatgttatctatggactttactgaaatgcgccccattttgttcatgtttaccttgctaaggagttgtgacaaccttcaaaagctagaaatagagtcgcgggacgtctttggtcagggttttgaggcagattgggagttcttaaatgctctgtggactgatggcatgtgtgccagtcttcaaattgtgcagatgagtcgtgtcatttggcttccaaatgaaattttacttatgaagcttatcctctctaaagcaaggcttcttcgcacattatatgttgatacacacccagatgattttgatgatccaataattgacttactaaaatgcaaaagagcttcagctcaagctcgtgtcctgtttgaaggtttggcgcagcagtattag

SEQ ID NO: 5060 - DNA, 1765 bp, Sorghum bicolor; identical to SEQ ID NO: 1143

SEQ ID NO: 5061 - DNA, 1424 bp, Zea mays
ggaactaaaaagcacaagaaatggcggccgccttctcctccaccgtcggagctccggcctccaccccgaccaggagcagcttcctcgggaagaagctcaacaagccgcaggtgtccgcggccgtgacctaccatggcaagagctccagcagcaacagcaggttcaaggcgatggctgccaaggaggtggacgagacgaagcagaccgacgaggacaggtggaagggcctggcctacgacatctcggacgaccagcaggacatcaccaggggcaagggcctcgtcgacaacctcttccaggcgcctatgggggacggcacccacgtcgccgtgctcagctcctacgactacatcagccagggccaaaagtcttacaacttcgacaacatgatggatggcttctacatagccaagggcttcatggacaagctcgtcgtccacctctccaagaacttcatgaccctgccaaacatcaaggttcccctcatcctgggtatctggggaggcaaaggccagggaaaatcgttccaatgcgagctggtcttcgccaagatgggcatcacccccatcatgatgagcgccggcgagctggagagcggcaacgccggagagcccgccaagctcatcaggcagcgctaccgtgaggcctccgacctcatcaagaagggcaagatgtcctgcctcttcatcaacgacttggacgccggcgcgggtcgcatgggcggcaccacccagtacacggtgaacaaccagatggtcaacgccaccctgatgaacatcgccgacaaccccaccaacgtgcagctcccggggatgtacaacaaggaggacaacccccgcgtgcccatcatcgtcaccggcaacgacttctccacgctctacgcgccgctcatccgcgacggccgcatggagaagttctactgggcgcccacccgcgaggaccgcatcggcgtctgcaagggcatcttccgcaccgacggcgtcgacgaggagcacgtcgtccagctggtcgacaccttccctggccagtccatcgatttcttcggcgcgctgcgtgcccgggtctacgacgacgaggtccgacggtgggtgagcgagaccggcgtcgagaacatcgccaggaagctcgtcaactccaaggagggcccgcccacgttcgagcagcccaagataacgatcgagaagctcttggagtacggacacatgctggtggcggagcaggagaacgtcaagcgtgtgcagcttgctgacaagtacctcaacgaggctgctcttggtgaagccaacgaggacgccatgaagactggctccttcttcaagtagaaagcaactctttgctattgctagctaggcgcgaggccggcataggatcgaggaggtgaatatatatattacttggatagtttaaaaaaaaaaaaaaaaaaa

SEQ ID NO: 5062 - DNA, 1709 bp, Zea mays
ggccgccttctcctccaccgtcggagctccggcctccaccccgaccaggagcagcttcctcgggaagaagctcaacaagccgcaggtgtccgcggccgtgacctaccatggcaagagctccagcagcaacagcaggttcaaggcgatggctgccaaggaggtggacgagacgaagcagaccgacgaggacaggtggaagggcctggcctacgacatctcggacgaccagcaggacatcaccaggggcaagggcctcgtcgacaacctcttccaggcgcctatgggggacggcacccacgtcgccgtgctcagctcctacgactacatcagccagggccaaaagtcttacaacttcgacaacatgatggatggcttctacatagccaagggcttcatggacaagctcgtcgtccacctctccaagaacttcatgaccctgccaaacatcaaggttcccctcatcctgggtatctggggaggcaaaggccagggaaaatcgttccaatgcgagctggtcttcgccaagatgggcatcacccccatcatgatgagcgccggcgagctggagagcggcaacgccggagagcccgccaagctcatcaggcagcgctaccgtgaggcctccgacctcatcaagaagggcaagatgtcctgcctcttcatcaacgacctcgacgccggcgcgggtcgcatgggcggcaccacccagtacacggtgaacaaccagatggtcaacgccaccctgatgaacatcgccgacaaccccaccaacgtgcagctcccggggatgtacaacaaggaggacaacccccgcgtgcccatcatcgtcaccggcaacgacttctccacgctctacgcgccgctcatccgcgacggccgcatggagaagttctactgggcgcccacccgcgaggaccgcatcggcgtctgcaagggcatcttccgcaccgacggcgtcgacgaggagcacgtcgtccagctggtcgacaccttccctggccagtccatcgacttcttcggcgcgctgcgtgcccgggtctacgacgacgaggtccgacggtgggtgagcgagaccggcgtcgagaacatcgccaggaagctcgtcaactccaaggagggcccgcccacgttcgagcagcccaagataacgatcgagaagctcttggagtacggacacatgctggtggcggagcaggagaacgtcaagcgtgtgcagcttgctgacaagtacctcaacgaggctgctcttggtgaagccaacgaggacgccatgaagactggctccttcttcaagtagaaagcaactctttgctattgctagctaggcgcgaggccggcataggatcgaggagggcgccaccaaaatgcattggagctaacgaacagcgaggggcgatcatggcagcagctgccactacatcttctaaacttgccatttttattatccctgatccatgtattactcttaatttgtacgtactacaatacgggatctggccaagcgcgatatatagctgggcatgcaaagtttttgtcgatgttttttttttgaaagaaacaaggtagaagggctagctgtgcttgttaaattaaaaagaaggtgagccaagactagcagaacaaggctgtacaaaaaaaactacacaaagtgtgccaaagaagaactctcagtgtcggcctatatatcaaaattgccatatgtttcactc

SEQ ID NO: 5063 - DNA, 1706 bp, Oryza sativa
ggcacgagctcgtgccgaattcggcacgaggtgatcctctacaatcatcgactttcagcaaattaagatggctgctgccttctcctccaccgttggagctccggcgtccactccgaccaacttcctggggaagaagctgaaaaagcaggtgacatcggcggtgaactaccatggcaagagctccaacatcaacaggttcaaggtgatggccaaggagctggacgagggcaagcagaccgaccaggacaggtggaagggtctcgcctacgacatctccgatgaccagcaggacatcaccagggggaagggtttcgtcgactcccttttccaggctcccacgggtgatggcacccacgaggccgtcctcagctcctacgagtacctcagccagggtctcagaacgtacgacttcgacaacaccatgggaggcttctacatcgcccctgctttcatggacaagctcgtcgtccacatctccaagaacttcatgaccctccccaacatcaaggtcccactcatcctgggtatctggggaggcaagggtcagggaaaatccttccagtgtgagctcgtcttcgccaagatggggatcaaccccatcatgatgagcgccggagagctggagagcggcaacgccggagagccggcgaagctgatcaggcagcggtaccgtgaggcggcagacatcatcaagaaggggaagatgtgctgcctcttcatcaacgatctggacgcgggtgcaggtcgcatgggaggcaccacccagtacacggtgaacaaccagatggtgaacgccaccctgatgaacatcgccgacaacccaaccaacgtgcagctccccgggatgtacaacaaggaggacaacccccgtgtccccatcatcgtcaccggcaacgacttctccacgctgtacgcgccgctcatccgtgacgggcgtatggagaagttctactgggctcccacccgcgacgaccgtgtcggcgtctgcaagggtatcttccgcaccgacaacgtccccgacgaggacatcgtcaagatcgtcgacagcttcccaggccaatccatcgatttcttcggcgctcttcgtgcccgtgtttacgacgacgaggtgcgcaagtgggtgtcggacacgggtgtggagaacattggcaagaggctggtgaactcgagggagggcccaccggagttcgagcagcccaagatgacgatcgaaaagctcatggagtacggatacatgcttgtgaaggagcaggagaacgtcaagcgtgtgcagctggctgagcagtacttgagcgaggctgctcttggtgacgctaactccgacgccatgaagactggttccttctacggttctgcgccatccagctgaataaaagatctctagctattcgcatcccatcgatgcatcgtaggcggcctgcataggaggaggagggcaaggagcacagcaagcaggtaacctgcctgtgccggaaggttgcaccgaccctgttgccaagaacttcgacccaacggcgaggagcgacgacggcagctgcctttacaccttttaagcaggccggcttgacgcttgctattaattatttctcctttttatgttttctctttgttctgtgtatcagatcgcgcccaagccatagctgggcatgacaagtttttgttaataataatataatataaagatatgggctaaaaaaaaaaaaaaa

SEQ ID NO: 5064 - DNA, 1675 bp, Oryza sativa Japonica Group
ggcacgagcaatcatcgactttcagcaaattaagatggctgctgccttctcctccaccgttggagctccggcgtccactccgaccaacttcctggggaagaagctgaagaagcaggtgacatcggcggtgaactaccatggcaagagctccaacatcaacaggttcaaggtgatggccaaggagctggacgagggcaagcagaccgaccaggacaggtggaagggtctcgcctacgacatctccgatgaccagcaggacatcaccagggggaagggtttcgtcgactcccttttccaggctcccacgggtgatggcacccacgaggccgtcctcagctcctacgagtacctcagccagggtctcagaacgtacgacttcgacaacaccatgggaggcttctacatcgccccttctttcatggacaagctcgtcgtccacatctccaagaacttcatgaccctccccaacatcaaggtcccactcatcctgggtatctggggaggcaagggtcagggaaaatccttccagtgtgagctcgtcttcgccaagatggggatcaaccccatcatgatgagcgccggagagctggagagcggcaacggagagccggccaagctgatcaggcagcggtaccgtgaggcggcagacatcatcaagaaggggaagatgtgctgcctcttcatcaacgatctggacgcgggtgcaggtcgcatgggaggcaccacccagtacacggtgaacaaccagatggtgaacgccaccctgatgaacatcgccgacaacccaaccaacgtgcagctccccgggatgtacaacaaggaggacaacccccgtgtccccatcatcgtcaccggcaacgacttctccacgctgtacgcgccgctcatccgtgacgggcgtatggagaagttctactgggctcccacccgcgacgaccgtgtcggcgtctgcaagggtatcttccgcaccgacaacgtccccgacgaggacatcgtcaagatcgtcgacagcttcccaggccaatccatcgatttcttcggcgctcttcgtgcccgtgtttacgacgacgaggtgcgcaagtgggtgtcggacacgggtgtggagaacattggcaagaggctggtgaactcgagggagggcccaccggagttcgagcagcccaagatgacgatcgaaaagctcatcgagtacggatacatgcttgtgaaggagcaggagaacgtcaagcgtgtgcagctggctgagcagtacttgagcgaggctgctcttggtgacgctaactccgacgccatgaagactggttccttctacggttctgcgccatccagctgaataaaagatctctagctattcgcatcccatcgatgcatcgtaggcggcctgcataggagtaggagggcaaggagcacagcaagcaggtaacctgcctgtgccggaaggttgcaccgaccctgttgccaagaacttcgacccaacggcgaggagcgacgacggcagctgcctttacaccttttaagcaggccggcttgacgcttgctattaaattatttctcctttttatgttttctctttgttctgtgtatcagatcggcgcccaagccatagctgggcatgacaaggtttttggttaataataatataatataaagatatggctaaaaaaaaaaaaaaaaa

SEQ ID NO: 5065 - DNA, 1525 bp, Triticum aestivum
gagcggggagagaacaatcgacacgatggcttctgctttctcgtccaccgttggagctccggcgtcgaccccgaccaccttcctcgggaagaaggtgaagaagcaggccggtgcgttgaactactaccatggtggcaacaagatcaacaatagggtggtcagggccatggcggccaaaaaggaacttgacgagggcaagcagaccgatgccgatcggtggaagggtctcgcttacgacatctccgatgaccagcaggacatcacgagggggaaaggcatcgtggactccctgttccaggcccccatgggcgacggcacccacgaggccatcctgagctcctacgagtacatcagccagggcctgcgcaagtacgacttcgacaacaccatggacgggctgtacatcgccccggcgttcatggacaagctcatcgtccacctcgccaagaacttcatgacactccccaacatcaaggtccctctcatcctgggtatctggggaggcaagggacagggcaagtcgttccagtgcgagctggtgttcgccaagatgggcatcaaccccatcatgatgagcgccggagagctggagagcggcaacgccggcgagccggccaagctgatccggcagaggtaccgcgaggctgccgacattatcaagaagggcaagatgtgctgcctcttcatcaacgacctggacgccggcgcggggcggatgggcgggacgacgcagtacacggtgaacaaccagatggtgaacgccaccctgatgaacatcgcggacgcgcccaccaacgtgcagttcccggggatgtacaacaaggaggagaacccacgcgtgcccatcatcgtcaccggcaacgacttctcgacgctgtacgcgcccctcatccgggacggccgcatggagaagttctactgggcgcccacccgggaggaccgcatcggcgtgtgcaagggcatcttccgcaccgacaacgtccccgacgaggccgtggtgaggctggtggacaccttcccggggcagtccatcgacttcttcggcgcgctgcgggcgcgggtgtacgacgacgaggtgcgcaagtgggtcggcgagatcggcgtcgagaacatctccaagcggctcgtcaactccagggaggggccgccgacgttcgaccagcccaagatgaccatcgagaagctcatggagtacggccacatgctggtccaggagcaggagaacgtgaagcgcgtgcagctcgccgacaagtacctcagcgaggcggcgctcggccaagccaacgacgacgccatggcgaccggcgccttctacggcaagtagaaagtcctatacttaagatgcatgcgtgcatgcatgcactatatatatgctggaatattttggactcgaatccactcaaactttttgattcatcgccgcacaggtagcccaattgtaagtctcttcttgaaagagaatccaattgtatatgttttcgtattgcctatataaaaaaaaaaaaaaaaaaaaaaaaaaaaaaaa

SEQ ID NO: 5066 - DNA, 1646 bp, Deschampsia antarctica
  misc_feature (59)..(59): n is a, c, g, or t
  misc_feature (117)..(117): n is a, c, g, or t
  misc_feature (351)..(351): n is a, c, g, or t
  misc_feature (375)..(375): n is a, c, g, or t
  misc_feature (1050)..(1050): n is a, c, g, or t
agcagcagtcttcactgatcacctgcaaagcttcgtccactgttgctgctctaaggtcnaccaagagagatggctgctgccttctcctccaccgtcggagctccggcttccacgccnaccagcttcctcggcaacaagctcaagaagcaggtgacctcggcagtgaactaccatggcaagagcttcaaggccaacaggttcaccgtcatggccaaggatatcgacgagggcaagcagaccgacggggacaagtggaagggcctcgcctacgatatctccgacgaccagcaggacatcaccaggggtaagggtatcgtcgactccttgttccaggcgcccatgggcgatggnacccacgaggccgtcctcagctcntacgagtacgtcagccagggcctcaagaagtacgacttcgacaacaccatgggaggcttctacatcgccccggctttcatggacaagctcgttgtccacctctccaagaacttcatgaccctgcccaacatcaagatcccactcatcttgggtatctggggaggaaagggtcaggggaaatccttccagtgtgagcttgtcttcgccaagatgggcatcaacccaatcatgatgagtgccggagagctggagagcggcaacgccggagagccagccaagctcatcaggcagcggtaccgcgaggccgcagacatgatcaagaagggcaagatgtgctgcctcttcatcaacgacctcgacgccggcgcgggtcggatgggcgggaccacccagtacaccgtgaacaaccagatggtgaacgccaccctgatgaacatcgccgacgcgcccaccaacgtgcagctcccggggatgtacaacaaggaggagaacccccgtgtccccatcatcgtcaccggcaacgacttctcgacgctgtacgcgcccctcatccgtgacggtcgtatggagaagttctactgggcgcccacccgcgaggaccgtatcggcgtctgcaagggtatcttccagaccgacaacgtcagcgacgagtctgtcgtcaagatcgtcgacacnttcccaggacagtccatcgacttcttcggtgctctgcgtgctcgggtgtacgacgttgaggtgcgcaagtgggtgtcgtccaccggaattgagaacatcggcaagaggctggtgaactcgcgggacggacccgtcaccttcgagcagcccaagatgacggtggagaagttgctggagtacggccacatgcttgtccaggagcaggacaatgtcaagcgtgtgcagcttgcggacacttacatgagccaggcagctctgggtgatgcgaacaaggatgccatgaagactggttccttctacggttagaacactcttcatacacccaccatctcttgctgcataggaggaggtaaaggagcacaacaaggcactttgcctgtgccggaaggttgtaccgaccgggatgccaagaacttcgacccaaccgcgaggagcgacgacggcagctgcctttacaccttttaagcatgccactttaattattctgatgtttcactctttgtacctaagcaccgcatcgcatacaagcgactgctgggcatgaaagtttttgtcaatatataaacgatattgagtataaaaaaaaaaaaaaaaaa

SEQ ID NO: 5067 - DNA, 1643 bp, Homo sapiens
ctgatcaccagcacagccgcgcatccaccgctgctagcaaggtcgagcaagcagcacagagatggctgctgccttctcctccaccgtcggtgccccggcttctacgccgaccaacttcctcgggaagaagctcaagaagcaggtgacctcggccgtgaactaccatggcaagagctccaaggccaacaggttcacggtcatggcagcggaaaacatcgacgagaagaggaacaccgacaagtggaagggtcttgcgtacgatatctccgacgaccagcaggacatcaccagagggaagggcatcgtggactccctcttccaggcgcccactggcgacggcacccacgaggccgtcctcagctcatacgagtacgtcagccagggactcaagaagtacgacttcgacaacaccatgggaggcttctacatcgctcctgctttcatggacaagcttgttgtccatctctccaagaacttcatgaccctgcccaacatcaagatcccactcatcttgggtatctggggaggcaagggtcaaggaaaatccttccagtgtgagcttgtcttcgccaagatgggcatcaacccaatcatgatgagtgccggagagctggagagtggcaacgccggagagccagccaagctcatcaggcagcggtaccgtgaggctgcagacatgatcaagaagggtaagatgtgctgcctcttcatcaacgatcttgacgccggtgcgggtaggatgggcgggaccacacagtacaccgtcaacaaccagatggtgaacgccaccctcatgaacatcgccgatgcccccaccaatgtgcagctcccaggcatgtacaacaaggaggagaacccacgtgtgcccatcgtcgtcactggtaacgatttctcgacgttgtacgcccctctgatccgtgatggtcgtatggagaagttctactgggctcccacccgcgacgaccgtatcggtgtctgcaagggtatcttccagaccgacaatgtcagcgacgagtccgtcgtcaagatcgtcgacaccttcccaggacaatccatcgactttttcggtgctctgcgtgctcgggtgtacgacgacgaggtgcgcaagtgggtgacctctaccggtatcgagaacattggcaagaagctggtgaactcgcgggacggaccagtgacctttgagcagccaaagatgacagtggagaagctgctagagtacgggcacatgctcgtccaggagcaggacaatgtcaagcgtgtgcagcttgctgacacctacatgagccaggcagctctgggtgatgctaaccaggatgcgatgaagactggtaccttctacggttagaacattctccatacacacccaccatctcttgctgcataggaggaggtaaaggggcacagcaaggtactttgcctgtaccggcaggatgcaccgaccagactgccaagaacttcgacccaacggcgaggagtgacgacggcagctgcctttacaccttttaagcatgccaatttaatatctgatgttttatcctttgtacctaagtaccgcatcgcatccaagcgattgctgggcatgttttgttaatatataaagatattgagtaaaaaaaaaaaaaaaaaaaaaaaaaaaaaaaaaa

SEQ ID NO: 5068 - DNA, 1471 bp, Sorghum bicolor
agacgtttccctcttccccttttctctccccctcccctcttctcctcccccgtaccaaacaaacctcaccgagtcgcaacgagagcgagaacgagaaccccccaaacgagagcgagtctccggcgattacgaggagcgcgggcacgccaaagcggcgaagcgcgaaggaaggaaggaggcagcaggatcagccatggggcttgactactacaagatcctgggcgtcgacaagggcgccaccgacgacgacctcaagaaggcctaccgcaagctagccatgaaatggcaccccgacaagaaccccaacaacaagaaggaggccgagaacaagttcaagcagatctcggaggcttacgaggtgctgagcgacccgcagaagcgcgcggtgtacgaccagtacggcgaggaggggctcaaggggcaggtgccgccgccgggcgccggcggggcgggccctggcggcgcgaccttcttctccacgggcggcgacgggccgaatgtgttccgcttcaacccgcgcaacgcggaggacatcttcgctgagttcttcggcggctccagccccttcggcggtatgggcggcggtggcatgggcggcagcggcatggggggtgggatgcccggcatgcggaccggcgggacgaggttctcctcgtccattttcggggacgatatattcggctctgcgttcggcggcggcccggacgggtacggcatgcacaccggcgggcggcccgtgaaggcgccggccatcgagcggaagctgccgtgcagcctggaggagctgtacaagggcaccaccaagaagatgaagatttccagagaaattgctgacgccagtgggaagacaatcccagtggaagagatcctaacgatcgacgtgaagccggggtggaagaagggcaccaagatcaccttcccagagaagggcaacgagacgcccaacacgatcccggccgacctcgtcttcatcatcgacgagaagccgcacccggtgttcacccgcgatggcaacgacctggtggtgacccagaagatcccgctggcggaggccctgacggggtacaccgctcacgtgacgacgctagacgggcgcagcctgacggtgcccatcagctccgtgatccacccggggtacgaggaggtggtgcgcggcgagggcatgcccatccccaaggacccgtccaggaagggcaacctccggatcaagttcgacatcaagttcccggcgaggctcacgtcggaccagaaggccggcgtcaagaggcttcttggacagtagagcgcgttgtgttttgttgttgtgtatcagacgtttttcgtgttggactgttggttgatcgaagtgggggacgctgccatttgcagcgtccgcgacgacgacgaggcaggccaccaagtgttgaacagcttgttgttatatatggttgagaacttgagatgcatagaataggattccttgtgctgtgct

SEQ ID NO: 5069 - DNA, 1434 bp, Zea mays
cccgtctcctaccccgaaccaaccaaacctcaccgaatcgcaacgacagcgagaacgtccaaacgagcgcgagtctccggcgataaccaagagcgcgggcacgcaaagcggcgaagcgggaaggaagcagtaacgatggggcttgactattacaagatcctaggcgtcgacaagggcgccaccgatgacgacctcaagaaggcctaccgcaagctcgccatgaaatggcaccccgacaagaaccccaacaacaagaaggaggccgagaacaagttcaagcagatctcggaggcgtacgaggtgctgagcgacccgcagaagcgcgcggtgtacgaccagtacggcgaggagggtcttaaggggcaggtgccgccgccgggcgccggcggggcggggcccggcggcgcaaccttcttctccaccggcggcgacgggccgacggtgttccggttcaacccgcgcaacgcggaggacatcttcgccgagttcttcggcggctccagccccttcggcggcatgggcggcggtggcatgggcggcagcggcatgggcggtgggatgcccggcatgcggagcggcggtacgaggttctcctcctccatcttcggggacgacatattcggctctgcgttcggcggcggcccggacgggcacggcatgcacgccggcgggcgggccgtgaaggcgccggccatagagcggaagctgccgtgcagcctcgaggagctgtacaagggcaccaccaagaagatgaagatctccagggaaatctctgacgccagtgggaagacgatcccagtggaagagatcctaacgatcgacgtgaagccggggtggaagaagggcaccaagatcacgttcccggagaagggcaacgagacgcccaacacgatcccggcggacctcgtcttcatcatcgacgagaagccgcacccggtgttcacccgcgacggcaacgacctggtggtgacccagaagatcccgctggcggaggccctgacggggtacaccgcgcacgtgacgacgctggacgggcgcagcctgacggtgcccatcagctccgtgatccacccgggctacgaggaggtggtgcgaggggagggcatgccgatacccaaggacccgtccaggaagggcaacctccggatcaagttcgacatcaagttcccggcgaggctcacggcggaccagaagtccggtgtcaagaggctgctcgggcagtagagcgcgcttgtgttgttttggagtattgtgtatcagacattttcgtgttggtttatcttgaactggggaggagggaagggagctgccatttgcagcctccgcaacgacgacgacgatgacgaggccaccaagtgttgagtacagaacagctactgttgtacggtgtatggttgagaaacttgagatgtgtagcggaggattccttgtgcg

SEQ ID NO: 5070 - DNA, 1519 bp, Zea mays
gaaccaaccaaacctcaccgaatcgcaacgacagcgagaacgtccaaacgagcgcgagtctccggcgataaccaagagcgcgggcacgcaaagcggcgaagcgggaaggaagcagtaacgatggggcttgactattacaagatcctaggcgtcgacaagggcgccaccgatgacgacctcaagaaggcctaccgcaagctcgccatgaaatggcaccccgacaagaaccccaacaacaagaaggaggccgagaacaagttcaagcagatctcggaggcgtacgaggtgctgagcgacccgcagaagcgcgcggtgtacgaccagtacggcgaggagggtctcaaggggcaggtgccgccgccgggcgccggcggggcgggccccggcggcgcaaccttcttctccaccggcggcgacgggccgacggtgttccggttcaacccgcgcaacgcggaggacatcttcgccgagttcttcggcggctccagccccttcggcggtatgggcggcggtggcatgggcggcagcggcatggggggtgggatgcccggcatgcggagcggcgggacaaggttctcctcctccatcttcggggacgacatattcggctctgcgttccgcagcggcccggacgggcacggcatgcacgccggcgggcgggccgtgaaggcgccggccatagagcggaagctgccgtgcagcctcgaggagctgtacaagggcaccaccaagaagatgaagatctccagggaaatctctgacgccagtgggaagacgatcccagtggaagagatcctaacgatcgacgtgaagccggggtggaagaagggcaccaagatcacgttcccggagaagggcaacgagacgcccaacacgatcccggcggacctcgtcttcatcatcgacgagaagccgcacccggtgttcacccgcgacggcaacgacctggtggtgacccagaagatcccgctggcggaggccctgacggggtacaccgcgcacgtgacgacgctggacgggcgcagcctgacggtgcccatcagctccgtgatccacccgggctacgaggaggtggtgcgaggggagggcatgccgatacccaaggacccgtccaggaagggcaacctccggatcaagttcgacatcaagttcccggcgaggctcacggcggaccagaagtccggcgtcaagaggctgctcgggcagtagagcgcgcttgtgttgttttgtattgtgtatcagacattttcgtgttggttcatcttgaactggggtggagggagctgccatttgcagcctccgcaacgacgacgacgatgacgaggccaccaagtgttgagtacagaacagctactgttgtacggtgtatggttgagaaacttgagatgtgtagcggaggattccttgtgcgaacttccagatcgtggtggttgtctgttcactggtccacgtcgttgcatttgcaacttgcaaggatcgcggatggagtaactgttggccactaaaaaaaaaaaaaaaa

SEQ ID NO: 5071 - DNA, 1434 bp, Zea mays
caactcgcaaggacagtgaaaacgcccaaacgagcgcgggcacgccaaccaaagcggcgaagcgcgaaggaaggaaggaaggaagcaagcaaagcagcagccatggggcttgactactacaagatcctgggcgtcgacaagggcgccaccgacgacgacctcaagaaggcctaccgcaagctcgccatgaagtggcaccccgacaagaaccccaataacaagaaggaggccgagaacaagttcaagcagatctcggaggcatacgatgtcctcagcgacccgcagaagcgcgcggtgtacgaccagtacggcgaggaggggctcaaggggcaggtgccgccgccgggcgccggcggggcgggctcaaccttcttctccaccggcggcgacgggccgacggtgttccggtttaacccgcgcaacgcggatgacatcttcgccgagttcttcggcggctccagccccttcggcggcatgggcgggagtgggatgcccggcatgcgggccggcgggtcgaggttctcctcgtccattttcggggacgatatgttcggctctgcgttcggcggcggcggcccggacgggcacggcatgcacaccggcggacgtgccgtgaaggcgccggccatcgagcggaagctgccgtgcagcctggaggagctgtacaagggcaccaccaagaagatgaagatttccagggaaattgctgacgccagtgggaagacgatgccagtggaagagatcctaacgatcgacgtgaagcccgggtggaagaagggcaccaagatcacgttcccggagaagggcaatgagacgccccacacgatcccggcggacctcgtcttcatcatcgacgagaagccgcacccggtgttcacccgcgacggcaacgacctggtggtgacccagaaggtcccgctggcggaggctctgacggggcacaccgcgcgcctggcgacgttggacgggcgcatcctgacggtgcccatcagctccgtgatccacccggggtacgaggaggtggtgcgcggcgagggcatgcccgtccccaaggacccgtccaggaagggcaacctccggataaagttcgacatcaagttcccggcgaggctctcggcggaccagaagtccggcgtcaagaggctgctcgggcagtagagcgcctcgtgttctggtgtgctgtgtgtcagacattttcgtgttggttgatcttgaactgggggatgctgccatttgcagcgtccgtgacgacgacgacgaggaggcaggccaccgagcgctgagtacagaacaagctagtggtggtatatggttgagaccttgagatgcacagcataggattccttgtgcaatcttccagacgggtggtgcttgtctgttcaccggtccatgtcgttccagccttgcaaaggtcggatggaataattattgagc

SEQ ID NO: 5072 - DNA, 1453 bp, Oryza sativa Japonica Group
cccctcttttcttcccccctctctctccccccagcatcgtaccaaaccacacaaccgcagcgacggcaacacgaagctctcctctccggcgagaatagccaagaacgcgacgcgaccacacccaagaggccgaacagatcgagctcaagaaggttttagcccatggggatggattactacaagatcctgggcgtcgacaaggccgccagcgacgacgacctcaagaaggcgtaccgcaagctcgccatgaagtggcaccctgacaagaaccccaacaacaagaaggaggcggagaacaagttcaagcagatctccgaggcgtacgaggtgctgagcgacccgcagaagcgagcggtgtacgaccagtacggcgaggaggggctcaaggggcaggtcccgccgccgggcgccggcggggccggcccgggaggcgcgacgttcttctccaccggcggcgacgggcccaacgtgttccggttcaacccgcgcaacgcggaggacatcttcgcggagttcttcggctcgtccagcccgttcggcggcatgggcggtggcatgggcggcggcatggggggagggcccgggatgcggacaggcggcacgcggttctcgtcgtcgatcttcggggacgacatcttcggctcggcgttcggcggcggcgccgacgggcaccacgggatgcacggcggtggcgccgggagggcgttgaaggcgccggcgatcgagaggaagctgccgtgcagcctggaggagctctacaaaggcaccaccaagaagatgaagatttccagggaaatcgctgacgccagtgggaagacaattccagtggaggagatcctgaccatcgatgtgaagcctgggtggaagaagggcaccaagatcaccttcccggagaaaggaaacgagcagccgaacgtgatcccggccgacctcgtcttcatcatcgacgagaagccgcacccggtgttcacccgtgacggcaacgacctcgtcgtgacgcagaagataccgctcgccgaggccctgaccggccacaccgtccacctgactacgctcgacggccgcagcctgacgatcccgatcacctccgtcatcaacccgggctacgaggaggtcgtccgcggcgagggcatgcccatccccaaggacccctccaagaagggcaatctcagggtcaagttcgacatcaagttcccggcgaggctcaccgccgaccagaagtccggcgtcaagcggctgctggggcagtagatcgagcaactgcaccgatgtagtatcaaagccttttcttgtgttggtggtgttgaactggtgatcatccggcagccgcgacgaatttctcgttgagagctttttcaggtcatgtgacacgatgcaaaaaggcaatgcggccttagatgtgtgagatactgatgagaactagtagaaacgttatacacagcttttgtggtgc

SEQ ID NO: 5073 - DNA, 1313 bp, Vitis vinifera
agagcaaagcagaagatgggtgtggattactacaagattttgcaggtggacaagagctctaaagatgaagatttgaagaaggcttatagaaagcttgctatgaagtggcatcctgataagaaccccaacaacaagaaagaggctgaagccaagttcaagcagatctctgaagcttacgaggttttaagtgatccccagaagagagcagtgtatgatcagtatggtgaagaaggcctcaaaggccaagtgccacctccagatgctggggttcctggtggagccacctacttccaaacgggagatgggccaacaatgttcagattcaacccgagaaatgccaacgacatattcgcggagttctttgggtattcaagcccatttggaggaatgggtgggactggaggcggtggcatgaggggttccaggttttccagtggaatgtttggggatgatatcttcagttcatttggggatagcaggccaatgagtcaaggtcctcgcaaggcgcctcctattgaaaatacactaccttgtagcctcgaagatctttacaagggaactaccaaaaagatgaagatttcaagggaaataatggatgcaagtgggaaaactataccagtggaggaaattctgaccatagaaatcaagccagggtggaaaaagggaacaaaaatcaccttcccggagaaaggaaatgagcaacccaatgtcattccagcggatctggttttcataatcgatgaaaaaccgcacagcaaattcacaagggagggtaatgacctggttgtgacacagaagataacgctagcggaagcactgacaggctataccgtccatctcacaacactagacgggaggagcctcagcattcccatcaacaatgccattcaccccaattatgaggaagttgttccaaaggaaggcatgcccataccaaaagaaccctcgaagaggggcaacctaagaatcaagttcaacatcaagtttccaacaaggttaactgcagagcagaagtcgggaatcaagaaactattgggttcttaaatcggattatggctaatgatgtgcgactgtatgatttaaaagagctactggatatttgtcttttttttttttttttcttttttgaaatagtgtgcatggccagaagtacccaatgcatttgtaactcaaatgaataaaatttggagtaaaagacaatagtgagtaaaatttcagttttgaattgctagaatagtgattgtagcgttatagttgaatggaagatcagaagattttcgtataatccagtctctcattaggtttttgctcta

SEQ ID NO: 5074 - DNA, 1340 bp, Glycine max
ggatcatcaacaacctcaaattccaagcacaagttctctgagttgttttgtgagatagcacatagcatagcaaggaaggagtattacaaccgaaaccctgaagaaaaaaagagtagaggaagaaaaaacacctgcaccaccaacgatgggtgtggattactacaagatcttgcaggttgataggagcgccaaagacgacgacttgaagaaggcttataggaaacttgctatgaaatggcaccctgataagaaccccaacaacaagaaagaagctgaagctaagtttaagcagatttccgaagcatacgaggtacttagtgatccccaaaagagagcaatctatgatcaatatggagaagagggtctgaagggtcaggttcctcctcctgatgctggtggtgctggaactggaactactttcttctccacaggagatatcccgggttcgtttcggttcaatccgaggaatgccgatgacatttttgcagagttctttggtttctcaagcccatttggtggaatgggtgggagaggtggtggcggcagtggtggtggcatgagatcaaggttccctggtgggatgtttggtgatgatatgtttgcatcttttggggaagggggaggagtacatatgagtcaaggtgcatctcggaaagctcctcccattgagagtaaattgccctgcactcttgaggagatatataaagggactacaaagaagatgaagatctctagagaaattgcagatgctagtggaaaaaccatgccagtagaggaaatcttgaccattaatgtcaagcctggctggaagaaaggaacaaagatcacattccctgaaaagggaaatgaacagccaaacgtgatgcctgcagaccttgttttcatcattgacgaaaaaccgcatggcgtcttcactcgtgacggaaatgaccttgttgtcacccagaagatttctcttgcagaggcattaactggttatacagtgcacctcactaccctagatggtagaaacttaaccataccaatcaacaatgttattcatcccacttatgaagaggttgtcccaagagaaggaatgccacttccaaaagatccatcaaagaaggggaatttgaggataaagtttaacatcaagttcccaactaggctcactgaagagcaaaaagcaggaatcagaaaactcttaaatgcctaagcgtgagatagtatagtatttgtcagattcccccctgggaactacttttttttttttttgtgaagatgtaagatataccaatatattttggttgattccccctgcgaaaaaattttgatttgattaaaaaaaaaaaaaaaaaaaa

SEQ ID NO: 5075 - DNA, 1449 bp, Arabidopsis lyrata subsp. lyrata
aacattccacagaattctccagactctgagaagaaacatcatgaatccgccgtttttaagaccaaactcttgtaatcttcaactaagaactatcataataaatccagaagaaacagagcaaatttcattttttctgaacaatatatcaataagaatcaggaaaagtgaagaagcgaaagagagaagaagaagaaggtcggatgggagtggattactacaaagtcctccaagttgatcgcaacgcaagcgacgatgatcttaagaaagcttatcgtaaactcgccatgaaatggcatcccgacaaaaatcccaacaacaaaaaagacgccgaagctatgttcaaacaaatctccgaagcttacgaggtactaagtgatcctcaaaagaaagctgtgtatgatcaatatggtgaagaaggtttgaaagggaatgtgccacctccagatgctggtggagctacttatttctctaccggggatggtccaacgtctttccggttcaacccgagaaatgcggatgatatatttgctgagttctttgggttctctagtccatttggtggtgctggcggaagaggtggtacaagattctctagcagcatgtttggtgatgatatatttgcttctttcagcgaaggaggaggcggtggtggtggctcaatgcatcacggtggagctaggaaggctgctcctatcgaaaataagttgccttgtagccttgaagatctttacaaaggaaccaccaagaagatgaggatctctagggagattgctgatgtcagtggcaagacaatgcaagtggaagagattttgaccattgatgtgaaaccagggtggaagaaaggcacaaagatcacattccctgagaaaggcaatgagcaacccggtgtgattccagcggatttagtcttcatcatcgacgagaagcctcacccggttttcactcgagagggtaacgacctcgtagtcacacagaagatctcacttgttgaggccttgacaggctacacagtgaacctgactacacttgatggtcgaagactgacaatcccagtcaccaacgtgattcatcctgagtatgaggaagtggttccaaaggaaggaatgccattgcagaaagaccagactaaaaaaggaaacttgaggatcaaattcaacatcaagtttcctacaaggttaacctcagagcagaagacaggagtgaagaagcttctcggctaaattgagttataattagaagattccggacaaggggatgtaaacagaagaagaacatcaaagcttctttatatcatgttggagatggcagagattgtgattaaatactgttaagacctttttgatcgatttgtaacatatgtgcgattggatacatcctaataaatttgttgctttctctataatcaaaacgcttctaaattcgtacctataaaggcaagagcattgttgt

SEQ ID NO: 5076 - DNA, 1291 bp, Ricinus communis
cctcttaatctggaaagttccacatttttctggtcccttaagacatgttcgagacacatcctttcctttttcttcttttttcctcattccccatcaatcatacacaatcatctcactccccatatctcacatacccaacaacatccgcaacaacaacacacaatattactagtacaaacccaccagccatatcacaaatcgtttgtagaaccttaaagttttagcagaaaatacaaagagtaagaaagtatacaaattcagtatgggtgttgattattacaagatattgcaggttgataagaatgctaaagatgatgatttaaagaaagcttatagaaagctcgcgatgaaatggcaccctgataagaacccaaataacaagaaagaagctgaagccaaattcaagcagatttctgaggcctatgaggttctaagtgatcctcaaaagagagcaatctatgatcaatatggagaagaagggctgaaaggccaggtgccaccacctgacgctggtggtcctggaggagctactttcttctcaactggggatggcccaacaacatttagattcaatcccagaaatgccaatgatatttttgctgaattctttggcttttcaagcccatttggaggaatgggaggtggtagtggcatgaggggtggttcagcaaggtcattcggtggaatgttcggcgatgatattttcagttctttcggtgatgggcgaccgatgagctctgctcctagaaaagcccctgcaattgagaatacattgccgtgtacacttgaggagctttatagagggactactaaaaaaatgaagatttcaagggaaattgcggatgctagcgggaagacgttgccagtggaggagatattgaccattgatataaagccaggctggaaaaagggaacaaaaatcaccttcccagagaaaggcaacgagcaaccaaatgtcatccctgcagatctcgtcttcataatagatgagaaaccgcacagcacattcacaagggaaggcaatgacctggttctgacgaagaagatatcacttgcagaagctctaacaggctatactgtgagtcttacaagtctagatggtagaagcctgaccatcccaatcaacagtgtgatccatccagactacgaggaagtaattccgaaggaaggcatgcctataccaaaagatccttcaaagaagggtaatctgagaattaaatttaacataaagttccccacaaggttaactgctgagcagaggtcaggaatcaagaaactattggcaccatag

SEQ ID NO: 5077 - DNA, 1068 bp, Sorghum bicolor
cccggaggccgagtgaatcgctgtgaaaccagccgatcgccgtttccagtgaagggggaatcgtttgcgctccgattctcgacgctgggaacccgtttggaaaggtttctgccgattcctccaagaaacgtatcggatccaaacggtccgtcgccgtccagacgctgcggcgaaggaacgaggacggagggagtgcgactccttgtgaggtggagaagccatggcggaggaccaaccgactccggccgcgtccgccgccgaggaggccgccatggatgcagataccggcggcgagcggcttagcgcagccgcgttggtgggcctgctccgcaggttcctcgccgtgcagcagcgccgggccgaggcctactccacgctacgaaggggtttttctgagtatatggctaatggtggtgaattggcctatcaaaaactgtgtggcagtattacagcggagttcaatgattgctcgaaacaagtcattgaaataatttccctgctctcaatgccagaatttagtcgtagtgatcttgccgatttactgaagggtgttcaagcacatgagaaagagaagttgcatttgacagcgaagattcaggtgctgaagaaagccggcaggccttcagagcgcctggtgaaccacgaggactgcaggtcacgcagcatggcccagcacgtgtgcgtgcacgtcaaggagatcacggaggccgctgggactgaggatgcagaggcagacgcggagtatgatgccgccctcaaggaggccatacagggcgtgcaggaggccgtgaccagcataaacgaacacatggaggaggtgcgctacgagattgacggactcgaggcggacacgatcggtagcaagtggagcgaagtcgaggaagcattccctggtaccctgtctataaaatagatagatgatttgttttctttggcaccgttcagttcattctacccgtgttgttcttttctttaaaactatgtgcccgtgttattcggctcagtgtactcctgttagtggagcctgacgctgaggaatttggtgtaggttaacttatgttttagtgt

SEQ ID NO: 5078 - DNA, 979 bp, Zea mays
gaacagctgtcggaagctgtctttccatgatctaggagccgtcgccgtcgagagctgaggcgaagcaacatagaagacgaggggggagtgcgactcctcgtgacttgtgagggagagaagccatggcggagatggagccgagcatcgggaaccatatggccgaagaccaaccgactccggccgcctccactgtcgaggaggccgctatggatgcagataccagcggcgagcggcgtagcgctgccgcgttggtgggcctgctccgcgggttcctcgccgtgcaacagcgccgggccgaggcctactccacgctacgaaggggtttttctgagtatatggcttatggaggtgaattggcctatcaacaactgtgtggcaatattacagcggagttcaatgattgctcaaaacaagtccttgaaataatttccctgctctcaatgccagaatttagtcgcagcgatcttgccgatttactgaagggtgttcaagcacatgagaaagagaagttgcatttgacagctaagattcaggtgctgaagaaagccggcaggccttcagagcgcctggtgaaccacgcagactgcaggtcgcgcagcatggcccagcacgtgtgcgtgcacgtcaaggagatcacggaggccgccggcaccgaggacgccgaggcggatgcggagtatgacgcggccctcaaggaggccatacagggcgtgcaggttgccgtgagcagcataaacgaacacatggaggaggtgcgctacgagattgacggactcgaggcagagacgatcggtagcaagtggagcgaagtcgaggaagcgttccctggtaccctgtctataaaatagatagatgagaagagatgagatgttgagcgtggaagactgaagaagaatcacgaacagagagattcgatgtgaatttttgggtactgttcagttcagggtactcgtgttattacaaaaaaaaaaaaaaaaaa

SEQ ID NO: 5079 - DNA, 999 bp, Zea mays
gtcggaaactgtctttcccattcatgatctaggagccttcgccgtcgagagctgaggcgaagcaacatagaagacgaggggggagtgcgactcctcgtgacttgtgagggagagaagccatggcggagatggagccgagcatcgggaaccatatggcggaagaccaaccgactccggccgcctccactgccgaggaggccgctatggatgcagataccagcggcgagcggcgtagcgctgccgcgttggtgggcctgctccgcgggttcctcgccgtgcaacagcgccgggccgaggcctactccacgctacgaagggggttttctgagtatatggcttatggaggtgaattggcctatcaacaactgtgtggcaatattacagcggagttcaatgattgctcaaaacaagtccttgaaataatttccctgctctcaatgccagaatttagtcgcagcgatcttgccgatttactgaagggtgttcaagcacatgagaaagagaagttgcatttgacagcgaagattcaggtgctgaagaaagccggcaggccttcagagcgcctggtgaaccacgcggactgcaggtcgcgcagcatggcccagcacgtgtgcgtgcacgtcaaggagatcacggaggccgccggcaccgaggacgccgaggcggatgcggagtatgacgcggccctcaaggaggccatacacggcgtgcaggttgccgtgagcagcataaacgaacacatggaggaggtgcgctacgagattgacggactcgaggcagagacgatcggtagcaagtggagcgaagtcgaggaagcgttccctggtaccctgtctataaaatagatagatgagatgagatgttgagcgtggaagactgaagaagaatcacgaacagagagattcgatgtgaatttttgggtactgttcagttcagggtacccgtgttattatacgtcctccaatccaaaatttagttctttcaaaaaaaaaaaaaaaa

SEQ ID NO: 5080 - DNA, 1185 bp, Oryza sativa Japonica Group
gaggggagggcgggacgccggccggagcacgcaaaaatctcgctcacctcgtgaagagctgagatcaaggggggagagatcggaggcggccgtagcgtggcggagatggatcctgctagcgtcagcgccagcgccagcggcgacccgatggcggagtgccctccggcggcggctgccgctgagggcagcgacgccatggactgcggcggcggcgggcggagcaacgcgagggtggccggagtgctccgcgggttcctcgccgtgcagcagcgccgcgccgaggcgtactccacgctccgaaggggtttttctgaatacatggctaatggaggtgaattagcttttcaacaactatgcgcgagtgttacggcggagttcaatgattgctcgaaacaagttctcgaaatggtagccctcctatcaacgccagaaatttgtcgtggcgatcttgccaacttactgaaggatgtgcaggcacacgagaaagagaagttgcatctgacggcaagaattcaggtgttgaagaaagctggtcgtccttcggaacgcctggtgaaccatgcagattgcaggtcaagcaatatggctcaacatgtctgtgtgcatgtcaaagagataaccgaggctgctggcacggaggatgcagaggcagatgctgagtatgatggtgctcttaaagaggccatacaaggtgttcaagaggcagtgaccagcataaacgagcacatggaggaggtgcgctatgagattgatgcccttggggcagaaataattggtaataacttggctgaagttgaagaagctttccctgatactctattgataaaatagaaaagttgcctaggcgctaaaaggcagagtgaaaacaaacaattggcacaaatattttggactaacaaacaagctattcgtgtccctttggggatttattaaaaaaaaggagagagaagagaaccggaagatttgtttatgccagcattgcttctttggtgttctgctattcactagaattcagaggaatgtggcatgcttttggtcccttgttattcactagaattcaaaggaatgtgggatgcaatctttatgggatcgatattcgatagagaatgtgatctgaaattgttgtgaatattgttatactaatttggtatactcatgccaataagattttctaaggctcaagct

SEQ ID NO: 5081 - DNA, 922 bp, Hordeum vulgare subsp. vulgare
gatgaaagaagcgcaaccaaaaaccggaggccaaagaaacggcgaccagatggcggaagcgaaatcgaccgccggggatgtcatggacgcggcggccagcagcgccgggcagagaactgccggggtggccggcctcctccgcgggttcctcgccttgcagcagcgccgcgccgaggcttactccaagctccgaaggggtttctctgaatatatggctaatggaggtgaatgtgcttatcaacaactatgtgggaatgttacagccgaatttaatgattgctcaacacagattcttgaaatggtgtccctcttctcaaagccaaatttttgtcgtggagaccttgctaacttattgaaggatgtgcaagcatgtgagagagataagttggagctgacagcgaggattcaggtgttgaagaaagctggccgtccttcggaacgcctggtaaaccatgagcactgcaggtcaagcagcacgtcccagcatgtgtgtgcgaacctcaaggagataaccgaggcttccggcacggaagacgccgaggcggacgcagagtacgatgctgctctgaaggaggccatacagagcattcaggaggcagtgaccagaattaacgagcatatggaggaggtgcggtacgagatcgacgccctcgaggcagacacggttgacagcaggctgagtgaagtcgaggaagctttccctgatgctctcttgatagagtagaggagtgatagtcgctgaagtcttaggccggggaagggtttctaagcagagttggctgcgacatggagtatttgaagaattagagctgttttcgtagttaatttttgtgaaaagtgagaatggatagcctgtttctactaacaacaaacaatattagcgtgctagctatttgaaagaggtgatatgaagattttagtt

SEQ ID NO: 5082 - DNA, 1169 bp, Zea mays
cacctcttcttcttctaccagtagttcattcattattagtacggtaccgggttggagtaattaaaaggccaccctccactcgcaccaccacactttagctcctcccactgctataggcagcccacatgcgcgcgcactcccaagtcccaagtcctaagctagccagctgagctcgctcccagtccaagcgccggcgccaccaccgcagctgctcgctggtcaccatgagcaaggagaagcaccaccgcgactggatcctccggcgctgctgtggctccctcgccgcctgcatcctgacgctggccgccgtcgtcggcttcatcgtgctcgtcatcttcctggcgctgcgcccctccaagccgtccttctacctgcaggacgtgcagctgcgctccatcgacctcagcgacccggcgctctccctcgacctccaggtgacgatcgcgtcgcggaacccgaacgagcgggtgggcgtgtactacaagacgctggacgcgttcaccacgtaccgcgacgaggcggtgacggtccccgtgtcgatgccggcgatctaccagggccacaaggacgtgtcggtgtggtcgccggtcatgtcgggcgacgcggtccccgtggcgcagtacgtggcggacgccatgaagcaggacatcgaggcgggatacgtgctgctccacgtcagggtggacggccgcgtcaagtggaaggtcggcagctgggtctcgggcagctaccacctcttcgtcaactgccccgcgctgctcgccaccagcggcagcgctgccgtcgccgccggcggcggcgtcttcgccgccagcgccgcgtccggggtcgtccccgccggcgtcaacaccaccgtctccctcaagttcacgcacccggcggactgcccgtcgacgtgtgagtcgtcgctgcgctacgacgacgaccggcgcgcgcttcgttcgtttgttttcgttcgtactggctagtgcagtgcgggggatcaacgtcgccccctcgctcgcgcggttctcgagcagttccttttccccgccagcaaatgttacttcccatatattctcgcttccgaagccggccccccccaagttagatcagctataccatacatacacatgtgtactagatttgctatatattattaccatattaacaaaaaaaaaaaaaaaaaa

SEQ ID NO: 5083 - DNA, 1180 bp, Zea mays
ctcttcttcttcttctaccagtagttcattcattattagtacggtaccgggttggagtaattaaaaggccaccctccactcgcaccaccacactttagctctccccactgctataggcagcccacatgcgcgcacactcccaagtcctaagctagccagctgagctcgctcccagtccaagcgccggccccaccaccgcagctcgatcacaccatgagcaaggagaagcaccaccgcgactggatcctccggcgctgctgcggctccatcgccgcctgcatcctgacgctggccgccgtcgtcggcttcatcgtgctcgtcatcttcctggcgctgcgcccctccaagccgtccttctacctgcaggacgtgcagctgcgctccatcgacctcagcgacccggcgctctccctcgacctccaggtgacgatcgcgtcgcggaacccgaacgagcgggtgggcgtgtactacaagacgctggacgcgttcaccacgtaccgcgacgaggcggtgacggtacccgtgtcgatgccggcgatctaccagggccacaaggacgtgtcggtgtggtcgccggtcatgtcgggcgacgcggtccccgtggcgcagtacgtggcggacgccatgaagcaggacatcgaggcgggatacgtgctgctccacgtcagggtggacggccgcgtcaagtggaaggtcggcagctgggtctcgggcagctaccacctcttcgtcaactgccccgcgctgctcgccaccagcggcagcgctgccgtcgccgccggcggcggcgtcttcgccgccagcgccgcgtccggggtcgtccccgccggcgtcaacaccaccgtctccctcaagttcacgcacccggcggactgcaccgtcgacgtgtgagtcgtcgctgcgctacgacgacgaccggcgcgcgcttcgttcgttcgttttcgttcgtactggctagtgcagtgcgggggatcaacgtcgccccctcgctcgcgcggttatcgagcagttagtttttcttgtagcaaatgttcgttcccatatattttcccttccgaagctgtgcagaaataagttaataagctatacatacatatacatgtgtactagatttgctatatattattaccatatttaatatgaacctcacagtttgaattagaaaaaaaaaaaaaaaaaa

SEQ ID NO: 5084 - DNA, 1057 bp, Zea mays
ctccccactgctataggcagcccacatgcgcgcacactcccaagtcctaagctagccagctgagctcgctcccagtccaagcgccggcgccaccaccgcagctcgatcacaccatgagcaaggagaagcaccaccgcgactggatcctccggcgctgctgcggctccatcgccgcctgcatcctgacgctggccgccgtcgtcggcttcatcgtgctcgtcatcttcctggcgctgcgcccctccaagccgtccttctacctgcaggacgtgcagctgcgctccatcgacctcagcgacccggcgctctccctcgacctccaggtgacgatcgcgtcgcggaacccgaacgagcgggtgggcgtgtactacaagacgctggacgcgttcaccacgtaccgcgacgaggcggtgacggtccccgtgtcgatgccggcgatctaccagggccacaaggacgtgtcggtgtggtcgccggtcatgtcgggcgacgcggtccccgtggcgcagtacgtggcggacgccatgaagcaggacatcgaggcgggatacgtgctgctccacgtcagggtggacggccgcgtcaagtggaaggtcggcagctgggtctccggcagctaccacctcttcgtcaactgccccgcgctgctcgccaccagcggcagcgcgggcgccgccggcggaggcgtcttcgccgccagcgccgcgtccggggtcgtccccgccggcgtcaacaccaccgtctccctcaagttcacgcacccggcggactgcaccgtcgacgtgtgagtcgtcgctgcgctacgacgacgaccggcgcgcgcttcgttcgttcgttttcgttcgtactggctagtgcagtgcgggggatcaacgtcgccccctcgctcgcgcggttatcgagcagttagtttttcttgtagcaaatgttcgttcccatatattttcccttccgaagctgtgcagaaataagttaataagctatacatacatatacatgtgtactagatttgctatatattattaccatatttaatatgaacctcacagtttgaatt

SEQ ID NO: 5085 - DNA, 922 bp, Hordeum vulgare subsp. vulgare
gggcagctctcactcagacacacacacacacacacacaccaaagcccagttgatcaggtcaccatgagcaagggcaaggttcaccacgactggatcctccggcggtgctgcggctccatcgccgcctgcatcctcacgctcgccgtcctcgtcggcttcgtcgcgctcgtcatctacctcgccctgcacccctccaagccctccttctacctccaggacatccaactccgctccatcgacctctccgatccggctctctcccttgacgtccaggtgaccatcgcgtcgcggaacccgaacgaccgggtgggcatctactacaagaccctgcacgccttcaccacgtaccgcgacgagccggtgacggtgccggtgtcgctgccggcgatctaccaggggcacaaggaccagtcggtgtggtcgccggtgatgtccggggactcggtgccggtggcgccgtacgtggcggacgccatgaagcaggacatcgccgccgggtacgtgctgctgcacgtcaaggtggacggccgcgtcaagtggaaggtcggcagctgggtctctggcggctaccacatcttcgtcaactgccccgcgctgctctccgccagcggcggctccgtcggcggcgccttcgccatgagcgccacggtgggcggcaagcagaccgtctcgctcaagttcacgcagccgtcctactgcaccgtcgacgtgtgagggacgcggacgcacgtcgcctcgctggggcaacgttcagagcgaacgtagcgctcttaattatttgcaggagtaaatcttgtagagtagcaaccatgatatgatagtgtataattatcaccaatttccttaccctgtttctgaatctgtgcagaataatgctactactttttatacatcgtattataagctgttcttgttaccactg

SEQ ID NO: 5086 - DNA, 1052 bp, Oryza sativa Japonica Group
actttccttctactcacacgcacacagtcctcagtatcacacacacactcacgctcacgctccactacaacgcactgtacacagttgattattagctagttgggtttctggcccggccgccggcgagatgggcaaggacaagcaccaccgcgactggatcctccggcggtgctgcggctccatcgccgcctgcatcctcacgctcgccgtcctcgtcggcttcatcgtgctcgtcatctacctcgcgattcacccctccaagccttctttctacctccaggacgtccagctccgcaacatcgacctctccgaccctgccatctccctcaacctccaggtgacgatcgcgtcgaggaacccgaacgacagggtgggggtgtactacaagacgctgcacgtgttcacgacgtacagggaggagccgatcacggtgccggtggagctgccggcgatctaccaggggcacaaggacgtgtcggtgtggtcgccggtgatgtccggcgagtcggtgcccgtggggcagtacgtggcggacgccatgaggcaggacatcgcggcgggctacgtgctgctgcacgtcaaggtggacggccgcgtcaagtggaaggtcggcagctgggtctccggcggctaccacctcttcgtcacgtgcccggccctgctcgccgccagcggcggcaacgtcggcggcgccttcgccatgagcgccacggcgggcggcggcgccggcggcaacgccaccgtctcgctcaagttcgcgcaggcggcggactgcaccgtcgacgtgtgacgcgaaatcaccgtgcaacccccagtgagcgtgtacgctagcttgtcgcgggagaacgcacgcacggcggcgccatgagagctacagacgcaacggcaacggcgcacctcgccgaagtaattagtatcggattagcaattgtaacagtgtaagcttatcgagtcagcgcgtcttccccccctcccccaattctgaatctgtgcagaataaaaggccacttttatatgtatacatccgcttagtatcatttgtcattgtcgaa

SEQ ID NO: 5087 - DNA, 1613 bp, Sorghum bicolor
cgccccgccgccggccctagccccctaatcccattccgtcgggaccgggcgagtccccaatcctcctcctcctccttcttcctcccccacgctcccgtctccgccgcgctaggaacttccaactcccaagcccagctgcctgcctagggttagggtcgcttggttcgtgtcaggcagggggcatcgcggccgccggaagagatgtcgcggacgctggtgcagccggtggggcagaagcgcctcaccaacgtggcggtggtgcggctgcggaagcacggccagcggttcgagatcgcctgcttccccaacaaggtgctctcctggcgctcccgcgtcgagaaggacatcgacgaggtgctccagtcccacaccgtctactccaacgtctccaagggcgtcctcgccaagtccaaggacctcaccaaggccttcggcaccgatgacctcacccaaatctgcatcgagattctggagaaaggggagctccaggtctccggcaaggagagggaggcgcagctctccagccagttccgcgacatcgccaccatcgtcatggagaagaccatcaacccggagacccgccgcccctacaccatcaccatgatcgagcgcctcatgcacgagatacacttcgccgtcgacccaaacctcacctccaaggaacaggctctaaaagttatcaagaagctgacagagcacttccccataaagcgtgcaccactgagggtgcggttcactgcaccaaaacccaattttccaggccttatggagaggattggcgaatggaatgctaccgtcatttcaaaggatgaattgagcactcagccttctattgtatgtgagatcgagccatctcttttgcactcgtgtgaggagcggttgaaggatgtgcaagggagggttgaagtgctgtctgtctcagcgcatgcagaaagtggcccatctgtggagcagcatgacagagtcgaagtgccacaagcagctcttgtgaaggaacctgatgctgttgctcagataagtgagacaatgcagaaacagagcatttctactgaaagccagggcaacgtacaaggcaagcagcagagaaggtgcaaggagtgtgatgtactcgtggaggacaagctatacagagagcactgcaagagtggatggcacaagcacaactacacacgccacaagaatgggctcccgcctctcagccaagaggagtgcatggtggagatggaattggctgactccaagaaggaccttaaagactacgatttttgatgaggatgattaacaaatgggtgcacagggcatgaaggtgttgccagtcggtttttgtttctgaggaagcgagtagtgaggacacatgatcgttttctgatgctgtatagtgaagcagtgaacctagttttgtgagatgcaaggaattgctagaatgagatggtttagccacattgttgaactgcaaccaacttggatggctttgtatagtagccggtgaacttggtagtggcacttgggtgctcgttgggcgttggttgttctttaactacatcctatgccgccagaaactttgcttgttatgatggatcaagctaatacgacctatccgcatcctttctgtt

SEQ ID NO: 5088 - DNA, 1636 bp, Zea mays
ctagactgtagcccttaatcgaaaccgtccccaacccttcttcctccacgctctcgtctccgccgcgctaggaacttccaactcccaagcccagccgcctgcctagggttaaggtcgcccctccgccccctcgctccgctcgtgaccggcagggttcgtcgccgccgttggatatgtcgcggacgctggtgcagccggtggggcagaagcgcctcaccaacgtggctgtggtgcggctgcgcaagcacggccagcgcttcgagatcgcctgcttcccaaacaaggtgctctcgtggcgctcccgcgtcgagaaggacatcgacgaggtgctccagtcccacaccgtctactccaacgtctccaagggcatcctcgccaactccaaggaactcgccaaggccttcggcaccgacgaccttacccaaatctgcatcgagattctggagaaaggggaactccaggtctccggcaaggagagggaggcgcagctctccagccagttccgcgacatcgcaactattgtcatggagaagaccatcaacccagagacccgccgcccctacaccatcaccatgatcgagcgcctcatgcacgagatacacttcgccgtcgacccaaacctcacctccaaggaacaggctctaaaagttatcaagaagctcacagagcatttccccataaagcgtgcaccgctaagggtgcggttcactgcaccaaaacccaattttccaggccttacggagaagattggcggatggaatgctaccataatttcaaaggatgaattgagcactcagccttctattgtatgcgagatcgagccatctcttctgcgctcatgtgaggagcggttgaaggatgtccaagggagggtcgaagtgctgtctgtctccacgcacgtagaaagtggcccatctgtggaacaacacaacagtgtggaagtgccacacgcggctcctgtaaaggaacctgatgctgttgctcagataagtgagaccatgcagaaacagagcatttctactgaaagccagggcaatgcacaaggcaagcaacagagaaggtgcaaggagtgtgatgtactcgtggaggacaagctttacagagagcactgcaagagtgggtggcacaaacacaactacacacgccacaagaatgggctcccgcctctcagccaagaggagtgtatggtggagatggaattggccgactccaagaaagaccttaaagactacgatttctgatgaggttacctggaagttcctttgacatgctatcttgtatttgggcactaatgttgtctgtctaatgcttttctaccacccaatcttatccaggatggttaacaaggggtgcacagggcatgaagttgtttccaatccgtttttattttaacgaggaagtgaggagtgaggcacatggtcgttttctgatgctgtataggaattattagaatgagatggtttagccacatctttgaactgagggtagaacctgtctgtctgtggattgctttggctttgtatcgtggacgagtgaacttggtagtggcattccaaattcgacattctatgcgggctagaaacttcgcttgttttaatacttatcggcatcctttcttttaaaaaaaaaaaaaaaa

SEQ ID NO: 5089 - DNA, 1528 bp, Oryza sativa Japonica Group
gtgtcgtgtcgtcttctccaacccatccaaaccaaagccgcggcggcgcgaggaggcagcgagagctagggtttggggcggcggaggggagatgtcgcggacgctggtgcagccggtggggcagaagcggctgacgaacgtggcggtggtgcggctccgtaagcacgggcagcggttcgagatcgcgtgcttcccgaacaaggtgctgtcatggcggacgcgggtggagaaggacatcgacgaggtgctccaatcccacaccgtctactccaacgtctccaagggcgtcctcgccaagtccaaggacctcctcaaggccttctccaccgacgaccacaccgccatctgcctcgagatcctcgacaagggcgagctccaggtctccggcaaggagcgcgaggcccagctctcctcccagttccacgagatcgccaccatcgtcatggacaagaccatcaacccggagacacgccgcccctacaccatcaccatgatcgagcgcctcatgcacgacgtccacttcgccgtcgaccccaacctcacttccaaggagcaggcactgaaagttattaagaagctaacagagcatttccccataaagcgtgcaccattgagggtgcgcttcactgcaccaaagtcaaaatttgcaagccttacagagaagcttgaagagtggaatgctaatgttatttcaaaggacgagtctggtagccagccctctgttgtgtgtgagattgagccatctattctacggtcatgtgaggagagattgaaggatgtgcaggggagggtggaagtactctcagtgtcagcgcacgcagaaggtggctcttctgtggatcaatatgaaaacactgaagaatctcaatcagtgcctgcagtggagattgatcctgttgctcggataggtgaggccatgcagaaacagtccatctcaagtgagccagaaaatcctgggcagggacaaggcaagcagcagagaagatgcaaagaatgtgacgtgcttgtggaggacaagttgtatagggagcattgcaaatctgggtggcacaagcacaactacacacgccacaagaacggccttcctccactcagccaggaggagtgcttggtggaaatggaattagccgactccaagagggacctaaaagactatgatttctgaggctgatatggtaaacattccgtgtggtacatggagatgcagtgtttttgtctgaggagaaaggttgtctgtttgatgctgtatagggaagcagggaagggaatatttgtgtaaccgcaatgtacgctacttgcaatctactgaaatggagtggtctatccacattgtctaaccgccaaagagtagcagaaacctggttgttgctgtatagctgggccagtaaatctggtggcagttttgaatgttgcttattctgtaatgggatgctatgctatgctatgtgagactacatgttagtatatcatgtttcttgctctcattcctgtggacagaagtgaatgaaaatttggagatcgattttgc

SEQ ID NO: 5090 - DNA, 1476 bp, Hordeum vulgare subsp. vulgare
gggggttttgcttcctccctgacaaaaatcgaggcctcaacccccccgagcgcgccccgcctcgccatcgcctcgccgaccggtcgccggagatgtcccgcacgctggtgcagccggtggggcagaagcggctgaccaacgtggccgtggtgcggctgcgcaagggcggccagcggttcgagatcgcctgcttccccaacaaggtcatctcctggcgcgagcgcgtcgagaaggacctcgacgaggtgctccagtcccacaccgtctactccaacgtctccaagggcgtcctcgccaagtccaaggacctcatcaggaccttcggcaccgacgacctcaccgaaatctgcctcgagattttggagaaaggggagctccaggtttctggcaaggagagggaggcgcagctgtcctcccagttccgggacatcgccaccatcgtgatggagaagactatcagtaccgagacccggcaccccttcaccatgaaaatgatcgagagcatcatgcacgagatacactttgccgtcgatccaaaccttacctccaaggaacaggcactgagagttattaagaaactaattgagaaccctaagtacaagataaagcgtgcaccattgacagtgcggttcattgcacctaagtccaatcttgctggccttatggagaagcttgatgggtggaatgcaattgttctttcaaaggatgaatctgctgatcagtcttccgttgtatgtgagattgaaccatctattctgcactcttgtgaagagaaactgaaggatgtgcaagggagggtggaagtactctcggtgtcggcacgcgcagaaggtggctcttctacagaccaatatgacaatgtggaggacaatgtggagaaggcacaggccgttcctgcgaaggagtctggtactgtcactcagctaagtgagaccatgcagaaacagagcctttcaagtgaagtggaaagccagggtcaggcaccaggcaagccgcagaaaagatgcaaagagtgcagcatattcatggaggacaagctgtacagagaccactgcaaatcggggtggcacaagcacaactacacacgccacaagaatgggcttcctccgctcagccaagaggagtgcttgatggaaatggagatggcagagtcccagaggggtctgaaggactatgatttctgaggtgagtcctgttttgtctgacacctcctctcaccacgcctccgaggccgatgaacggcatgtgcaagacatgaagtttgcagtcttgtttccgaggacatggtcatcattgggtaaatgctggtatgaagtggggaacgagttttgcgatacgctatggagtttataaaatgtaatggggttgctgaatgtgaactgtgaaggtagtagaacctgggtcatgtgtagttggctgtgtacacttttggcagttatgcggcatgtgctgtaacgggatgctatatgatgcgcc

SEQ ID NO: 5091 - DNA, 1128 bp, Zea mays; identical to SEQ ID NO: 1144

SEQ ID NO: 5092 - DNA, 1405 bp, Zea mays
gttcaattcgatcacttcttccattccaatttccacacacacacgtctcagctcactccctcctccagtttcgtcagctcgtcatcataaaccgaacacagagctctcgattccattccaggatgctgctgaacccggcgtcagagacgtcggtgctagacaccatccggcagcacctcctcgaggagccagcggcggcggaggcgcggccggccgacgagagcttcgggagcctggtggcggaccagtggagcggctcgctcccgttccgcaccgacgacgccgacgacatggtggtgttcggggtgctgcaggacgccttcgcctacggctggctgcccgacggctcattcgtgcacgtgaagcccgagccagtgcggtcccccgactcgtcctcctaccacccctgctcctacgacggctcaccctgcttcggcctcctggacccggagccgccgctgacgcccggcaccaccacgcccgggagggggcaggaggaggccgcggcggccatggcccggggcaagcactacaggggggtgaggcagcgcccgtggggcaagttcgcggcggagatcagggaccccgccaggaacggcgcgcgcgtctggctcggcacgtacgacaccgccgaggacgccgcgctcgcctacgaccgcgccgcctaccgcatgcgcggctcgcgcgcgctcctcaacttcccgctccgcatcggctccggggacaagcgcccgtcgccggcgccgcccgagcccaccacctcctcggactcctcctcgtcttcggccagcggctcgcacaagaggcggaagcgaggcgaggccgcggctgccaacatggccatggcgctggtgccctcgccctcccagcttaaccggccggcccagccgtggttccctgccgcgccggtcgagcaggcggcgatggctccgcgcgtggagcagatcgtcgtctagtctagccatgcgccggcgaaagcgggggcaaggccctgcgctgcacttgcgtgacagctccaccggatggaatgcgaatatgcgataaagctcgggagcaactggggtccgtccggatgccgctgttgctccgtgcaactggcgcaagtggaagaagctgtctattggaagtcaaattgagccgcgcggacagtccggcgctgaggccggacggtccgcggtccggacagtctgcggtggtggcgcggacggtccgcgcgcgcgcagagtcagttagggttcctagtttctcgcgggatttgttacctaaaaccgcgggattaactcgggaaacagttggaaacggatccagacctccccctttatatagatgaaggtctacggccgattgaaccccaacaatcgaacaaatcaagtctatttctcgtttttaaaaaaaaaaaaaaaaa

SEQ ID NO: 5093 - DNA, 1453 bp, Sorghum bicolor
ttccattcccatttccccattcgacaaacagctcactccctcctagcttcgtcagctcataaaccaaacagaaagagagctcgattccaggaaggaaaggatgctgctgaacccggcgtcggaggcgttggtgctggacaccatccggcagcacctgctggaggagccagcggcggcggcggcgggggacgagagcttcgggagcctggtggcggaccagtggagcggctcgctcccgttccgcaccgacgacgccgacgacatggtggtgttcggggcgctgcaggacgccttcgcctacggctggctgcccgacggctccttcgcgcacgtcaagcccgagccggcgctgtccccggactcccactcctactcctactcctacgacggctcctcctgctgcttcggcggcctcctcctggacccggcggagccgctgacgcccagcagcgaggcggccgccacgcccaggcgggaggcggccgcggcggccgtggccaggggcaagcactaccgaggggtcaggcagcggccgtggggcaagttcgcggcggagatcagggaccccgccaagaacggcgcgcgcgtctggctcgggacctacgacaccgccgaggacgccgcgctcgcctacgaccgcgccgcctaccgcatgcgcggctcccgcgcgctcctcaacttcccgctccgcatcggctccgagatcgccgccgcggccaccgccggggacaagcggccgtcgcccgagcccgccacctcctcctcggactcgtccttctcgtcctgctcctccaccacctcctcgtcttcgaccagcggctcgcccaagaggcggaagcgaggcgaggccgccgccgccaacatggccatggcgctggtgcccccgccttcccagctgaaccggccggcccagccttggttccctgccgcgccggtcgagcaggcggcgatggcgccgcgcgtggagcagctcgtcatctagccctgcgccgatcggtcagagccagccagccagccaccgggcaccgcggcgaggcaatgaggcgtgccgcgacggatgatgcgccagccaaggctcctacgggacaaggagctgcgcggcacttgcgcggtgcacgaatgcgacgggggcgcgcgcgcgcgcgcatcccggtgacagctccagcggatggaatgcgataagctcgggagcaattggattgggatccggacgagctccgctccggatgccgctgttgctcctccgtgcaactcgcgcaagtggaacggaagaagctgtctgtgtgtaatcaagtgtcttgtctgcgaacgaatttttcggtatatgcgtcgttgtcacttgtcagggtggggtgtggttgtgatgtgctgctgataaaaactgtacagacaaaagaaaaaacgtagggagacgatgagatcaagaacaatctgctttgttcgttggtaccac

SEQ ID NO: 5094 - DNA, 1358 bp, Zea mays
gccgttcaactcgatcacttctttcccttccacacaggcacacaggcacacagcacacagctcactcaactcccctcccgcttcgtcagctcaccatcataaaccaaacagagagctctctccctctcggtcgttccattccaggatgctgcttaacccggcgtccatgctggacaccatccggcagcacctcctggaggagccaccagcggcggccgacgagagcttcgggatcctggtggcggaccagtggagcgactcgctcccgttccgcaccgacgacgccgacgacatggtggtgttcggggcgctgcaggacgccttcgcctacggctggctacccgacggctccttcgcgcacgtgaagcccgagccggtgcggtcccccgactcctcctactactcctacgacggctcctgcttcggcggcctcccgtacccggagcagccactgacgcccggcagcgagggcgaggcggccgccacgcccagccccaggagggaggaggccgcggcggccgtggccaggggcaagcactacaggggcgtcaggcagcgcccgtggggcaagttcgcggcggagatcagggacccggccaagaacggcgcgcgcgtctggctcggcacctacgacaccgccgaggacgccgcgctcgcctacgaccgcgccgcctaccgcatgcgcggctcgcgcgcgctcctcaacttcccgctccgcatcgcctccgagatcgccgccgcggccgccggcgacaagcggccgttggcgttgcccgagcccgccacctcctcggactcgtcctccaccggcggctcgcccaagaggcggaagcgaggcgaagccgccgccgccaacatggccatggcgctggtgcccccgccttcccagcttagccggccggcccagccatggttccctgccgccgcgccggtcgagcaggcggcgatgccgccgcgcgtggagcagctcgtcatctagctagccccgcgcgttaaaccggactcgcggcgagacaatgaggcgtgcaagtgcaacgacgggtgagccggcggaaggcggaggaaaacaggacgaggcccttgcgcgaatgcgacggcgcgcggaatgcgataagctcgggagcaattgggggtccggatgccgctgttgctccgtgcaactcgcgcaagtggaaagaagctgtctgtgtgtagattcatccaagtgtcttgtctgcaaacggattttcggtatatgcgtccttgtcacctgtcagggtggtgtggtgtgagggcttgggcttgtgctgctgataagtttggagatctgtacaaagaaaaaacgtagggagaagatgagaccaaaaaaaaaaaaaaaa

SEQ ID NO: 5095 - DNA, 1433 bp, Thinopyrum intermedium
cccgggagacaacagagcacggcgaggatgctgctgaacccggcctcggaggcgctggtgctcgacagcatcaggcagcacctcatggaggagacggcggccgtggcggcgccggcggaggcgaggaggcagaggccggcctactgccggagcaccagcttcgggagcctggtggccgaccagtggagcgagtcgctcccgttccgcgccgacgactccgacgacatggtcgtctacggcgcgctccgcgacgccttctcctgcggctggctccccgacggctccttcgccgccgtcaagccggagcccctgccttccccggactcctacgcgtgcgacggcccgtcgtgcttcggtttcctcgagccggagacgcctccggccacgcccccgggcgagggcgaggaggccacggcgttcatgggcgaggcggccgccgcggtggccagggggaagcactaccgaggggtgcggcagcggccgtggggcaagttcgcggcggagatccgggacccggccaagaacggcgcgcgcgtgtggctcggcacctacgacaccgccgaggacgccgccgtggcgtacgaccgcgccgcgtaccgcatgcgcggctcccgcgcgctcctcaacttcccgctccgcatcggctccgagatcgccgccgcaaaagccgcggccgcggccgccggcgacaagcgtccgtcgcccgagcccgcgacctcggactcgtcctcctcctcgtccgggtccccgaaaagaaggaagagaggcgaggccgcggccgcgtccatggccatggcgctggtgccgccgccctcccagctgagccggccggcccaggcgtggtaccccgccgcgccggtcgagcaggtggccatggcgccgcacgtgcagcagctggtcagctaggccccgcgtgccagccaccgggcgcacgatcgtaaaagacaatgcgcaagtgcaatggatcgatcagcaagtgcatggacgcgacagcaacatgagcccgcctttcactgttgcacggtgcaaggtggtgatggcaatggagtgcgatgccgatcgagcgagcgagcaatccggcaaagcaaccttagcgacggctccatttggatatttggatgggccgagaaaggaagataagctcggagcaactgggtgctgcaatttggtctggaatgacagttcctcctctgtctgctcggtgcaactcgcccaagtggatcaaagcgaaactgtgctagtagtatcgggtcgtcgtggtccgttgtgagtcgtagggttatatttgcgtcgctgtcagagtgcgtgtggtaaaaattacacccttgtgatcgagcttaatggaagttgtgaaactgtacaagcatctgtagagagaattccagggagtgaattcttaccccatcatcaaaaaaaaaaaaaaaaaaaaaaaa

SEQ ID NO: 5096 - DNA, 1478 bp, Triticum aestivum
cccgggagacaacagagcacggcgaggatgctgctgaacccggcctcggaggcgctggtgctcgacagcatccggcagcacctcatggaggacacggcggccgcggcggcgccggtggcggaggcgaggcggcagcggccggcctactgccgcagcgccagcttcgggagcctggtggcggaccagtggagcgagtcgctcccgttccgcgccgacgactccgacgacatggtcgtctacggcgccctccgcgacgccttctcctgcggctggctccccgacggctcctttgccgccgtcaagccggagcccctcctgccttccccggactctgcctacgcgtgcgacggcccgtcctgcttcggtttcctcgagccggagacgccccccgccacgtccccgggcgagggcgaggaggagggcgcggcgttcatgggcgaggcggccgccgcggtggcgaggggcaagcactaccgcggggtgcggcagcggccgtggggcaagttcgcggcggagatccgggacccggccaagaacggcgcgcgcgtgtggctcggcacctacgacaccgccgagggcgccgccgtggcctacgaccgcgccgcgtaccgcatgcgcggctcccgcgcgctcctcgacttcccgctccgcatcggctccgagatcgccgccgcgcacgccgcggccgcgcacgccgcggccgcggccgccggggacaagcggccgtcacccgagcccgcgacctcggactcgtcatcctcgtcctcctcctccgggtccccgaaaaggaggaagaggggcgaggccgcggccgcgtcgatggccatggcgctggtgccgccgccctcgcagctgagccggccagcccacgcgtggtaccccgccgcgccggtggagcaggtggccatggcgccgcgcgcgcagcagctggtcagctaggccccgctcgccagcccccgggcgcacgatcggtcgtaaaagcacacaatgcgcaagtgcaatggattcgccagcaagtgcatggacgcgacagcaacaggagcccgcctttcactggtgcacggtgcaaggtggtgatggcaatggagagcgatggcgagcgagcgagcgagcaatcaggcaaagcaaccttggcgacggctccatttggatatttggatgggtcgagccgtcgacaacggaagataagctcggagcaactgggtgctgcaatttggcctggaatgatagttcctcctctctccactgctcggtgcaactcgcccaagtggatcaaagcgaaactgtgccagtatcggatcgtcgtggttccttctgagtcgtagggttatattttgtcactgtcagagtgcgtgtggtaaaaattacaaactcgtgaatcgtgatcgagcataatggaacttgtgaaactttacaagcatctgtggagagaattccagggagtgaattgttaccccattaaaaaaaaaaaaaaaaaa

SEQ ID NO: 5097 - DNA, 1606 bp, Oryza sativa Japonica Group
accattcaactcgaacacaccacacactgaagtgtgtaaccaagtttgagacagaggcgaggtcgggtcagcaaggaagacggcgatgacggcgcgaagcatgttgcggaaccacccggaggcgtcggtgctcgacaccatccggcagcacctgctggaggagccgcgcggcggcggcggtggcgaggcggcggaggcgagcttcgggagcctggtggccgacatgtggagcgactcgctgccgttccgcgacgacgacgccgacgacatggtggtgttcggcgcgatgcgggacgcgttctcgtgcgggtggctgcccgacggcgtgttcgcggaggtgaagccggagcccctgctctcgccggactcgtcgtcgtacgacgggtcctcttgctgcttcggcttcgcggacgtgtcggagccggtgacgccgagcgacgcggcgtcgggggcggcagaagcggcggccgcggcggcggcggcgacggcggagcacgggaaggaggaggaggccgcggctgcggtggcgagggggaagcactacaggggggtgaggcagcggccgtggggcaagttcgcggcggagatccgggaccccgccaagaacggcgcgcgcgtgtggctcggcacgttcgacaccgccgaggacgccgccctggcgtacgaccgcgccgcctaccgcatgcgtggctcccgcgcgctcctcaacttcccgctccgcatcggctcggagatcgcagccgccgccgccgccgcagcggcagcggcagccggcgacaagcggccgtcgccggagccggcgacctcggagtcgtccttctcctcctcatcctcctgcaccaccaccaccacctcctcctcaacctcctcctccggctccccgaaacggagaaagagaggcgaggccgcggccgcgtccatgtccatgcccctggtgcccccgccttcccagctgaactggccggtgcaggcatggtaccccgccgccgcaccggtcgagcaggtggcgatcaccccgcgcgtggagcagctcgtcatctaaagcgcgcgacgcacagtgaagcaagcaaaccaagccagcaatggtcgacgtcatatcaccttgacgccccaacggattgaccagcgagcacgagccagccattgctttgcacggcgcgagacggcaaagggatcaggcgatggaaccccgtgagcgcgacggcgcaagcgagcagcatccccgcgaaagctccaccggatgcaaaattgcaaacgcgataagctcgcgggtgcaactggtgaaattgggtggtgcaatcgtgtgtgggcgagctctagcagatagtagcgtggtggtggtggtggtattgttgtcccggcgcaactcgcccaagtgggggggtgaggaggatactctgtgtctactagcgtgttcttgtcagggaatgcacggtgtcgtcaagtgtgcaaatcctaagggtcataattcgcgtcattgtcactagtggatcacccgagtgagtttgtgagggtttcagtgaaaaaaaaaaactgtacaaacgatgtcttgtggtgtggagaagcagcagagatgaagaacaatcaatcatcccctttgttcttt

SEQ ID NO: 5098 - DNA, 952 bp, Oryza sativa Indica Group
atggcgcgaagcatgttgcggaaccacccggaggcgtcggtgctcgacaccatccggcagcacctgctggaggagccgcgcggcggcggcggtggcgaggcggcggaggcgagcttcgggagcctggtggccgacatgtggagcgactcgctgccgttccgcgacgacgacgccgacgacatggtggtgttcggcgcgatgcgggacgcgttctcgtgcgggtggctgcccgacggcgtgttcgcggaggtgaagccggagcccctgctctcgccggactcgtcgtcgtacgacgggtcctcttgctgcttcggcttcgcggacgtgtcggagccggtgacgccgagcgacgcggcgtcgggggcggcagaagcggcggccgcggcggcggcggcgacggcggagcacgggaaggaggaggaggccgcggctgcggtggcgagggggaagcactacaggggggtgaggcagcggccgtggggcaagttcgcggcggagatccgggaccccgccaagaacggcgcgcgcgtgtggctcggcacgttcgacaccgccgaggacgccgccctggcgtacgaccgcgccgcctaccgcatgcgtggctcccgcgcgctcctcaacttcccgctccgcatcggctcggagatcgcagccgccgccgccgccgcagcggcagcggcagccggcgacaagcggccgtcgccggagccggcgacctcggagtcgtccttctcctcctcatcctcctgcaccaccaccaccacctcctcctcaacctcctcctccggctccccgaaacggagaaagagaggcgaggccgcggccgcgtccatgtccatgcccctggtgcccccgccttcccagctgaactggccggtgcaggcatggtaccccgccgccgcaccggtcgagcaggtggcgatcaccccgcgcgtggagcagctcgtcatct

SEQ ID NO: 5099 - DNA, 1250 bp, Hordeum vulgare subsp. vulgare
gattcgactccacgcaatcgcctcgttcacacacagtgatcagctcacccacagaccagaccaccccggaacgcaacagagcagaggagcggcaaggatgctgctgaacccggcatcggaggcgctggtgctggacagcatcaggcagcacctcatggaggacacggcggccgcggcgccggcgctggcggaggcgaggaggcagaggccggcctactgccggagcgccagcttcggaagcctggtggcggaccagtggagcgagtcgctcccgttccgcgccgacgactcggacgacatggtcgtctacggcgccctccgcgacgccttctcctgcggctggctccccgacggctccttcgccgccgtcaagccggagcccctcccttccccggagtcctgctacggcggtttcctctacccggacacgcctccggccacgtctgccggcgacggcgagggcgacggcgaggaggaggaggccgcggcgctcatgggcgaggcggcggccgcggccgtggccagggggaagcactaccgcggggtgaggcagcggccgtggggcaagttcgcggcggagatccgggacccggccaagaacggcgcgcgcgtgtggctcggcacctacgacaccgccgaggacgccgccgtcgcctacgaccgcgccgcgtaccgcatgcgcggctcccgcgcgctcctcaacttcccgctccgcatcggctccgagatcgccgccgcccacgccgcagccgcggccgccggcgacaagcgtccgtcccccgagccggcgacctctgactcgtcctcctcgtccgggtccccgaaaaggaggaagaggggcgaggccgcggccgcgtccatggccatggcgctggtgccgccgccctcccagctgagccggccggcccaggcgtggtaccccgccgcgccggccgagcaggtggccatggcgccgcgcgtgcagcagctggtcagctaggcgaccccgctcgccagcctaacggcgctcgatcgtaaaagacaatgtgcaagtgcatggatgcgacagcaacgggagcccgcctttcactgttgcgcggtgcaaggtggcgatggcaatggagtgcgatggcgagcgagcagtgcaatcaggcaaagcgacctcagcgacggctccatttggatatctggatgggtcgaggatggaagataagcttggagcaactgctgggtgctgcaatttggcctgaaatgatagatatttcctgctc

SEQ ID NO: 5100 - DNA, 591 bp, Sorghum bicolor
atgtccaagtacggaaccatcccgaccacctcctccactccgccaccgggggcctcctcctcctcctcctccccgctcgacttcatctcccgcgccaaggcccgcggcgcgtccgcgctggccacgcgccgcccctggcgggagctcgcggacccgcgcgcgctctccgtcccgcgcgggttctcggccgcgtaccgccgcgcgcgcgccaacctcgcgcacttcgccgccaactacgcgctcgtcgtcctgctcgtcgtcttcgtctccctcctctggcggccggtctccatgctcgtcttcctcgcctgcttcgccgcctggctcgtcctctacttcctccgcgaccgcgacgcggacggggcgctcgtggtctgcgggcgcggcgtcggggacggcgtcgtcatcgcggtcctctccgcggtcacgcttgtcctgctcctgctcacgggcgccacgggcttcatcctcacctcgctgctcgtcggcctcctgctcgtcctgctccacgctctgctgcaccgccccgccgacagcatcgacgacgaggccgggagatggtacacgccagtgccgccgtccagctactag

SEQ ID NO: 5101 - DNA, 825 bp, Zea mays
acttcgacgacttcgccggcgccgagcacaatccacgaccgcccccaggccccagccagccatgtccaagtacggtaccatcccgacaacctcgtctactccggcgcccgagggctcctcccagctcgacttcatctcccgcgccaaggcccgcggcgcgtccgcgctcgccacgcgccgtccctggcgcgagctcgcggacccgcgcgcgctctccgtcccgcgcggcttctcagacgcctaccgccgggcgcgcgccaacctcgcgcacttcgccgccaactacgcgctcgtcgtcctgctcgtcgtcttcgtctccctgctctggcggccggtctccatgctcgtcttcctcgcctgcttcgccgcctggctcgtgctctacttcctccgcgaccgcgacgtggacgggacgctcgtgatttgcgggcggggcgtcggggacggcgtggtcgtcgcggtcctctccgcggtcacgctcgccctgctgctgctcaccggcgccacgggcttcatcctcacctcgctgctcgtcaggcttctgctcgtcctgctccacgcactgctgcaccgccccgccgacagcatcgacgacgaggccgggagatggtacacgccagtgccgccgtccaactactagctagtctgagcctctgaggtgctgctcctcccccttttgcttcttggttactggattgcagaccgatgttcttcagttcttgatccgttcgtgctcttgtccatagaaaatgtgcttaaatttgtgttcttcgttatctcggaagatttattactgaaattatgcttttaaaaaaaaaaaaaaaa

SEQ ID NO: 5102 - DNA, 949 bp, Hordeum vulgare subsp. vulgare
gaagttcagtccgctccacccccacacgttttcctcctaccgtcgccggccagcggtcacctccgccctccagccagccatgtcgaagtacggaaccatccccatctcctcctcctccgatgccccgcctcccggctcgtctccgctggacttcatctcccgggccaaggcccgcggcgcgtcggcactagcgacgcggcaaccctggcgtgagctcgccgacccaaaggccatcgccttgccccgggggctaggggacgcctacctccgcgcccgcgccaacctcgcgcatttctccatgaactacgccatcgtggtcctcggcgtcgtcttcctctccctgctctggcaccccttctcgctcatcgtcttcctcgcctgcatggtcgcctgggtcttcctctacttcctccgcgacgtcccgctcgctctcttcggccacaccatcggtgacggcgtcgtgctcgccgtcctctcggccgtcacgctcatcctgctcctgctcaccggagccaccggcaacatcctcacctcgctgctcgtcggcctggtgctcgtcctgctgcacgccttgctgcatcgccccgcggacagcatcgacgaggaggccggacggtggtacacacccgtcacaccgccgccgccttactagtctctgaatgctgagttgcgccttgtaatctcgttggttcttggtttgtgaattgtgttccgtggctcgctgcaatccttataattgttttgttgaggtgtatcgtttcttaatccatatccgcacttgttcatgaataatacgtgcgaaataagtgttcttgttccatttttagcttttcgaacattgatcatacgatgaactatggtcagttatagggagtaagtggccaatctgaagtcaacttgggctcaattatatgtgttcttgtataatggattaatggttgcttagctc

SEQ ID NO: 5103 - DNA, 580 bp, Oryza sativa Japonica Group
atgtcgaagtatggcaccatcccgacctcctcgtcctcggacgggccgcccccgggctcctcctcctcctccccgctcgacttcatctcccgcgccaaggcgcgcggcgcgacggcgctggcggagcggcggccgtggcgggagctcgccgacccgcgggcggcgtccgtgccgcgcgggctcggcggcgcgtaccgccgcgcgcgcgccaacctgggccacttctccatgaactacgccatcgtggtgctcgccgtggtgttcctctccctgctctggcacccggtctccctcatcgtcttcctcgcctgcatggtcgcctggctcttcctctacttcctccgcgacgagccgctcgcgctctgcggccgcgccgtcggggagggcgccgttctcgcggtgctctccgtgctcaccctcgtcctcctcctcctcaccggcgccaccgtcaacatcctcacctcgctgctcgtcggcgtcgtcatcgtcctcctccacgccgtcttccaccgccccgccgacagcatcgacgaggaggccggccggtattacacccccgtcccgccgcagccgtcctact

SEQ ID NO: 5104 - DNA, 2366 bp, Sorghum bicolor
agaacacgagctccagatcgcacttgcccccgagctagctagccagccagcaagcccactaatcacttggcctcacgaggtagctagctacaagagggcagaggcatgccggaggcgccggtcaccacgatgcgagaggcggcgacggcggcggcggcggcggcggtgcccgagacgcaccgcgagctgctcgagtacatcgagcgcgtgacggcgggggcggcgcaggtgcagcgccgcgtgctggcggagatcctggcgcagaacgcgcccgccgagtacctccggaggctgggcgtggcgggcgacgcgccgggcgccgtcgacgcgttccgccgcgccgcgccgctcgtcacctacgaggacatcctccccgacgtgctgcgcatcgccaacggcgacacgtcgcccatcctctccggcaagcccatccgcgagttcctcaccagttccggcacgtcgggaggggagcgcaagctgatgccggcgatagccgacgagatggaccggcggtcgctgctgtacagcctactgatgccggtgatgagccaggccgtgccggggctggacaagggcaagtgcatgtacctctacttcgtcaaggcggagtcgcgcacgccggggggccacccggcgcgcccggtgctgacgagcttctaccggagccgccacttcctggagcggccgcacgacccttacaccgtgtacaccagccccgacgaggccatcctctgcgtggacgcgtaccagagcatgtacgcgcagctgctgtgcggcctcgtgcaccgcgccgacgtgctccgcgtgggcgccgtcttcgcctcgggttttctccgcgccatccgcttcctggagaagcactggcagcgcctgtgccgggacatccgcaccggcacgctggacgccgaggcggtcacggaccgcgccgtgcgcgccgccgtggagcagcgggtgctcctccgcgccgacccggcgctcgccgacgccgtcgaggccgagtgcgccaggacgtcgtggcaggggatcatccggagggtgtggcccaacaccaagtacatcgacgtcatcgtcaccggcgccatggcgcagtacatcccgcagctcgagttctacggcggcgggctgccgctgacctgcaccatgtacgcctcctccgagagctacttcggcatcaacctgaaccccatgtgcaagcccagcgaggtcgcctacaccctcatccccacaatgtgctacttcgagttcctccccttgccacagcccggcgacgacgacgccggcgagcccgaccagcgcgaccttgtcgacctcgtcgacgtcaagctcgggcacgagtacgagctcgtcgtcaccacctactcagggctgtatcggtatcgcgtgggcgacgtgctgcgcgtggccgggttcaagaaccaggcgcccatgttcaacttcctgcgccgcaagaacgtggtgctgagcatcgacgcggacaagaccgacgaggcggagctgcacgcggcggtgagcggcgcggtgcagcacctggccccgttcggcgcgtcgctggtggagtacacgagctacgcggacgctgggaccatcccgggccactacgtgctcttctgggagctccgcctccgcgctgcggcggctgcgggcgcgacgccgacgccggtgccggcgtcggtgttcgaggactgctgcctggccgtggaggaggcgctgaacagcgtgtaccggcagggccgcgccgccgaccgctccattggcccgctggagatcagggtggtgtcggacggcacgttcgacaagctcatggactacgcgctcgcccgcggcgcgtccatcaaccagtacaaggcgccccggtgcgtgcgcccgggccccgtcgtggagctgctggacgggcgggtgcaggccagctacttcagccccaagtgccccaagtggagccccggagtaggcaagcagtggagcagcgacgccgccgccgccgccaagaaggcggccgccggcggcagcaatggtggaggtggaggaggaggggcggtcgtcgtcgcctgatgatcgagctatactagtagggagttgtttaattagctggctaattccggaaccgttagtgggagagagagagagttgtggtcgatcgaatcgagtatgatgagtgagctgatgtatgtatccacatgcatatgcatggggacgagtgattagcagcgagctagcgctaatcatcgtcgtgtggtagcttaagtattgtacgcgtcgcgctatcatgggcttttggttcttcctctcgtttttttctttgttttttctgtggttttgtaataaagctgtacgtacgtagtagtgaccttgggaacctctgtcccttt

SEQ ID NO: 5105 - DNA, 2164 bp, Oryza sativa Japonica Group
gagacagcaagcctagttcacttcactgatcacaagctcagctaagccaagcactccctagctactactacacgacacgcgtgccatgccggaggcggtagcggccgcggtgtcgccggcggcggcggcggcgacggcgatgtgcgcggagcaccgggagaagctcgagcacatcgagcgcgtgacgaggaacgcggggcaggagcagcgccgcgtgctggaggagatcctggcgcagaacgcgcaggccgagtacctgcgccgcctcggcgtgccgggcgacgcgccgggcgccgacgaggcgttccgccgtctggcgccgctcgtcacgtacgaggacatcctccccgacgtcctccgcatcgccaacggcgacacctcgcccatcctctccggcaagcccgtcagcgagttcctcaccagctccggcacgtcgggtggggagaggaagctgatgccgacgatagaggaggagatggagcggcggtcggggctgtacagcttgctgatgccggtgatgagccggcaggtgcccgggctggacaagggcaaggccatgtacctctacttcgtcaagtcggagtggcgcacgccgggcgggctgccggcgaggcccgtgctgacgagcttctaccggagccgctacttcctcgagcggcctcacgacccgtacacggtgtacacgagccccgacgaggcggtgctgtgcgaggacgcgtaccagagcatgtacgcgcagctcatctgcggcctcgtccaccgcgccgacgtgctccgcgtcggcgcggtgttcgcgtcgggcttcctccgcgcgatccgcttcctggagaagcactggccgagcctgtgccgcgacatccgcgcgggggagctcgacggcggggtcaccgaccccgccgtgcgcggcgccgtcgggagggtgctccgcggcgccgacccggcgctcgccgacgcgatcgaggcggagtgcgcgaggccgtcgtggcagggcatcatccggagggtgtggcccagcaccaagtacatcgacgtcatcgtcaccggcgccatggcgcagtacatcccgacactggagttctacggcggcgggctgccgctcgcctgcaccatgtacgcctcctccgagtgctacttcggcctcaacctcaaccccatgtgcaagcccagcgaggtcgcctacaccctcatcccaacaatgtgctacttcgagttcctccccgtcaactccggcgccaacgacgtcgccgccccggagcccgaccaccgcggcctcgtcgacctcgtcgacgtcaagctcggacacgagtacgagctcgtcgtcaccacctactccggcctgtaccgctaccgcgtgggcgacgtgctgcgcgtggccgggttcaagaacgcggcgcccatgttcgccttcgtgcggcggaagaacgtggccctcagcatcgactccgacaagacggacgaggcggagctgcacgcggcggtgaccgaggcggtgcagcacctggcgccgttcggggcgtcgctggtggagtacacgagctacgccgacacggcgaccaccatcccgggccactacgtgctgttctgggagctcaggtcgccggcgggcgggacgccggtgccggcgtcggtgttcgaggactgctgcctcgccgtcgaggaagggctcaacagcgtgtaccgccagtgccgcgccgccgaccggtcgatcgggccgctggagatccgcgtcgtggcggacggcacgttcgacaagctcatggactacgcgctcagccgcggcgcgtccatcaaccagtacaaggcgccgcgctgcgtgcgcccgggccccgtcgtcgagctgctcgacggcagggtgcaggccacctacttcagccccaagtgccccaaatggtgcgccggcggcaacaagcagtggatcagcagcggcgccgccgcgaagaagacgacgacgacctgtgatagcttggctgtgtgagagagaatttgctagctatggtgattaattaaggagctaattaagcatggatggttgattaatcggttagctaatcaacgagtgttagttcagggtagtagtacgtacgtatgatcatctagctattgggcttttgttttcttttcttttctcctctctcacttttgtaataaagtactaaaattttcc

SEQ ID NO: 5106 - DNA, 1833 bp, Sorghum bicolor
atgccggaagcaccgaccaccaagacaaccctgccggccggcggctttggccccggggcgcaccgcgaggcgctcgagttcatcgagcatgtcacggcgaacgccgggaaggtgcagcggcgcgtcctcgctgagatactgacgcagaacgcgccggccgagtacctgcgccgctacggcgtcccgggaggatccgccgacgccgtcgaagccttccgccgcgtcgtcccgctcgtcacctacgagggcctccagccggacatactccgcattgccagcggcgatacctcgccgatcctctcaggcaaacccatctccgagttcctcacgagctctggaacatccggaggggagaggaagctgatgccgaccatcgccgacgagctggacaggaggtcgttgctgtatagcctgcagatgccggtgatgagccagtcggtgccggggctggacaagggcaaggcgatgtacctgctattcgtgaaggcggagtcgcgcacacccggcgggctggtggcgcggccggtgctaacgagctactaccggagccggcagttcctggagcggccgcacgacccctacaccgagtacacgagccccaacgaggccatcctgtgcgtggactcgtaccagagcatgtacacgcagctgctgtgcggcctcgtccaccgcgccgacgtgctgcgcgtcggcgccgtgttcgcctcgggcttcctccgcgccgtccgcttcctcgagaagcactggccgcgtctgtgccgcgacatccgcacgggcacgctcgacccggagatcacggaccgcgccgtgcgcgacgccgtcgtcggcagggtacttcgcggcgccaacccggcgcttgccgacgagatcgaggccgagtgcgcgggaccgtcatgggagggcatcatccggcgcctgtggccccgcaccaagtacatcgatgtgatcgtgaccggggctatgtcgcagtacatcccgacgctggagttctacggcggggggctgcctctggcgtgcaccatgtacgcctcttccgagtgctacttcggcctcaacctgaagcccatgtgcaagccaggcgacgtggcatacacgctcatccccaccatgtgctacttcgagttccttcctctccagtgcagcgacggcaaggcggagccgagccaccgcgacctggttggcctcgtggatgtgaagctcggtcacgagtatgagctcgtggtcaccacctactccgggttgtatcggtaccgcgtgggcgacgtgctgagggttgccggcttcaagaacgaggcgccgatgttcaagttcatcaggcggcagaacgtggcgctgagcatcgactcggacaagacggacgagacggagctgcacgcggccgtgagcggcgcggtgcagcacctggcgccgttcggcgcgtcgctggtggagtacaccagctacgccgacgcggcgaccatcccgggccactacgtgctgttctgggagctgcgcgcgggcagcacggcggtgccggcgtccgtgttcgaggactgctgcctgtcggtagaggaggcgctcaacagcgtgtaccggcagtgccgggcctgcgacaagtccatcgggcccctggagatacgcgtcgtgtccgagggcaccttcgacaagctcatggactacgccatcagccgcggcgcgtccatcaaccagtacaaggcgccgcggtgcgtgcgcccggggcccgtcgtggagctgctcgacgcaagggtgcaggccaagtacttcagccccaagtgccccaagtggagtccagggaacaagcaatggaacgccgccagcaacggggacgcctga

SEQ ID NO: 5107 - DNA, 2234 bp, Oryza sativa Japonica Group
cacaaaccaagctccataccgctgcctacatctctggttagtagccaccaaggtccaaggagtaacacgctccgtgagagaccgaaatccagggagcacaaattgcacatttgcaccaagcacactcgctgcagctgcagtgacatgccggaagcaccgaccgccaagacagcaccggcctacggctacgcccccggggcgcacgccgaggcgctcgagttcatcgagcacgtcacggcgaacgccgggcaggtgcagcggcgcgtgctcggcgagatcctggcgcagaacgcgccggccgagtacctgcgccggtacggaatccccgggtcccccgacgttgtcgacgccttccgccgcctcgtcccgctcgtcacatacgagggcctccagccagacatcctccgcatcgccaacggcgacacctcgccgatcttctccgggaagcctatctccgaattcctcacgagctcgggcacgtcgggaggggagaggaagctcatgccgaccatcgccgacgagatgaacaggcggtcgctgctgtacagcctgctgatgccggtgatgagccagtcggtgtccgggctcgacaaaggcaaggcgatgtacctgctcttcgtgaaggcggagtcgcgcacgccgggcgggctcgcggcgcggccggtgctcacaagctactaccggagccggcagttcctcgaccgtccgcgcgacccctacacatcttacacgagccccgacgaggccatcctgtgcgtggactcctaccagagcatgtacgcgcagctgctctgcggcctcgtccaccgcgccgacgtgctgcgcgtgggcgccgtgttcgcctccggcttcctccgcgccatccatttcctcgagaagcactgggcgcgcctctgccacgacatccgcaccggcgagctcgacccggagatcaccgaccgcgtggtgcgcgacgccgtcgggcgggtgctccgcgccgacccggcgctcgccgacgcgatcgaggacgagtgcgctagggcgtcgtgggagggcatcatccggcgcctgtggccacgcaccaagtacatcgacgtgatcgtgaccggcaccatgtcgcagtacatcccgacgctcgagttctacggcggcggcctgccgctgacgtgcaccatgtacgcctcttcggagtgctacttcggcctcaacctgaatcccatgtgcaagcccagcgacgtcgcctacacgctcatccccaccatgtgctactacgagttcctccccgtcaattgcaacaatgccactgccgaggcgagccaccgcgacctcgtcgacctggtcgacgtaaagctcgggcacgagtacgagctcgtggtcaccacgtattccgggttgtatcgttatcgcgtgggcgacgtgctgagggtggcggggttcaagaacaaggccccgatgttcagcttcgtgcggcggcagaacgtggcgctgagcgtcgactcggacaagacggacgagacggagctgcacgcggcggtgagcggcgcggtgcagcacctggcgccgttcggcgcgtcgctggtggagtacacgagctacgcggacgcggccaccatcccgggccactacgtgctgttctgggagctgcgcgccggcagcacggcggtgccggcgtccgtgttcgaggagtgctgcctgtccgtggaggaggcactgaacagcgtctaccggcagggccgcgcgtgcgacaggtccatcggcccgctcgagatacgcgtcgtggcggagggcaccttcgacaagctcatggactacgcgatcagccggggcgcgtccatcaaccagtacaaggcgccgcggtgcgtgcgccctggcccggtcgtcgagctgctcgacgcgagggtgcagggcaagtacttcagtcccaagtgccccaagtggagccccgggaacaagcaatggaacaaaagcaaggatctggtcggcaagggagacgcctaatattgaagctagagggtgatgatctgatcgagtatttgtgtgagctggtaattaattaacggtacatgcatatggtcattggtcgatatgtttctttagggatatgataattcatgtttgaattatctctgatgctgcgagaggatcgaatagttatgagatgacgacttagcctatatgatcatttgctttactctttctctgctgtaacgcagtatatgttatttcctccgtctcaaaatataagcatttttagt

SEQ ID NO: 5108 - DNA, 1944 bp, Zea mays
tgcatgtcgacgtcgcacgcgcgcgtgaagagtgatagtaataatggccgtacccgtacgtgcgatgatggtggcagctccggcacgtccggaggggagcgcaagctgatgccggcgatagccgacgagatggaccggcggtcgctgctgtacagcctgctgatgccggtgatgagccaggccgtgccggggctggacaggggcaggtgcatgtacctctacttcgtgaaggcggagtcgcgcacgccgggcggccacccggcgcgccccgtgctgacgagcttctaccggagccgccacttcctggagcgcccgcacgacccctacaccgtgcacaccagccccgacgaggccgtcctctgcgtggacgcgtaccagagcatgtacgcgcagctgctgtgcggcctggtgcaccgcgccgacgtgctccgcgtgggcgccgtcttcgcgtcgggcttcctccgcgccatccgcttcctggagaagcactggcagcgcctgtgccgggacctccgcaggggcgcgctcggtgccgaggtgaccgaccgctccgtgcgcgccgccgtggcgcgggtgctccgcgccgacccggcgctcgccgacgccgtcgaggccgagtgcgccaggccgtcgtggcaggggatcatccggagggtgtggcccggcaccaagtacatcgacgtcatcgtcaccggcgccatggcgcagtacatccccacgctcgagttctacggcggcgggctgccgctcacctgcaccatgtacgcgtcctccgagagctacttcggcatcaacctcaaccccatgtgcaagcccagcgaggtcgcgtacaccctcatccccacaatgtgctacttcgagttcctgcccttgccacagcccggccccggcggcaccgacgacgccgatcccgaccatcgcgacctcgtggacctcgtcgacgtcaagctcgggcacgagtacgagctcgtcgtcaccacctactcaggtctgtaccgctaccgcgtgggcgacgtgctgcgcgtggccgggttcaagaaccaggcgcccatgttcaagttcctgcggcggaagaacgtggtgctgagcatcgactccgacaagaccgacgaggcggagcttcacgcggcggtgagcggcgcggtgcagcacctggcgccgttcggcgcgtcgctggtggagtacacgagctacgcggacgcggggaccatcccgggccactacgtgctgttctgggagctgcggctccgcgcgggggacgtgccggtgccggtgccggcgtcggtgttcgaggactgctgcctggccgtggaggaggccctgaacagcgtgtaccggcagggccgcgccgccgaccgctccatcgggccgctggagatccgggtggtgtcggacggcacgttcgacaggctcatggactacgcgctcgcccgcggcgcctccatcaaccagtacaaggtgccgcggtgcgtgcacccgggccccgtggtggagctgctggacgggcgggtgcaggccagctacgtgagccccaagtgccccaagtggagccccggcggcggtaagcagtggagcagcgacgccgccgccaagaagcccgccgccgccgccggcagcaataatggaggaggggcggtcgtcgcctgatcgtcgtccgtcgagatatactagtgaactttaattaattagctggctaattccggaaccgtcgttgttgttcgtgggagagagagactcgatcttgtggtcgatcgattgtgatagctgatctatccgtgtgcatgtatgcatgcatggctacgatcgaatgattatctagctgggtaatcatcgggtgtgtggtagcttattaagtattgtacgcgtcgtgatatcatgtgagctagcttttgtttctttttattttcttttatgtggttttgtaataaagttggagtacgtagt

SEQ ID NO: 5109 - DNA, 2221 bp, Zea mays
gacgcatgcagtgcagcttcagcaatggcgtcgtcgtcgtctacgaccgctactaccagctgctgccccctactgctggcgctcttatgggtcctcatggcggcacaccgcggccacgccgccgccgtgttcaccggcctggtcttcgagagcccgggtgaggcggaggccttcgaggacgcgctgctgcgccaggcctgcttcaacgtctccttcttcttgtccgcgggtggccgccgcgaggcctgcgtgtcgcggctcgacacggcgcggggaggcgcgggcagcgggcccgtgcccgtgctccgcgccgcgctgcgcgacacgctcggcgaggccgtgggcgccgcgggagcggtccgggggctcgcctcgctgtccaaccacgcgcgcgaggaggtagcgctgcgcgactgcgtcgagctgctgggatactccgtcgacgagctcgggtgggcgctggacgctatggccgccgacgacaccgacgacggcggcggcctggagctgctggactcgcccggccgccgcagcgcctcaagccgcgccgagaacgacatccacgcgtggctcagcgcggcgctgggcaaccaggacacctgcgtggccggcttccacggcaccgacggccgcctgctgcgccgcgtcgaggccgccgtagcgcagctcacgcagctggtcagcaacctgcttgccatgcacaagcgcctgcgcagcatcacgccgctgcgccacggacctcctaaaagtaacagcgcctcctccggcgccggcgacgacgagctgccgccgtgggtgatggacgtcgaggacgaggaggagctcgtcgccaagcgcgcccgccgcgcaggcaggacgtcgtcgacgcgcgtggacgtcgtggtggcgcaggacggcagcgggcgctaccgcaccgtcagcgaggcggtggcacgggcgcccagccacagcaagaggaagtacgtgatctacgtcaagcgaggggagtaccacgagaacgtggaagtcaggaagaagaagaccaacatcgtcatcgtcggcgagggcatgggcgagacggtgatctccggcagccggagcttctccagcggctggaccaccttccgcagcgccaccttcgcggtgtccggcgccgggttcatcgcgcgggacctgacgttccgcaacacggcgggtccggcggcgcaccaggcggtggcgctgcgcgtggactcggaccgctccgccttcttccgcgtggccgtggaggggcaccaggacacgctgtacgcgcactcgctccggcagttctaccgcgactgccgcatcgccggcaccgtggacttcgtcttcggcaacggcatcgtcgtggtgcagcgcagcctcgtcgccacgctgccgctggcgcccggccagacgggcagcgtcaccgcgcagggccgcaaggaccccaaccagaacacgggcttctccttccacggctgcgtgctggaggccaagtacccgacgtacctgggccgcccgtggaagcccttctcgcgggtcgtggtcatggagtcctacctgggctctggcatccaggcccgcgggtggctcgagtgggcagctgctggctcgggggaccacagcccgggcctcgccacgctgttctacggagagtacaggaactacgggcccggtgcgggcgtcgcgggccgagtgaagtggcctggctaccacgtgatcatggacgccgccgtcgccagccggttcaccgtcaggcgattcatcgacgggcttgcgtggttgcccggcaccggcatcaccttcacggcggatctattcaggagatgacgatggccagcgctaatgcagttgcttgattgggttacagtattttttttgaagggtgcacaaaataaggatattttagtatcatattataaagatcataagtattgctaaccacaaaataaggacatattatattataatgatgaatataaaattgccttttttttgggacatagggatataaggtgttaactttgtgcgtttttccttgagttgatatcactttggtaagtaattagggttgtaatgtgttgcaaactaagtatgtacgtaaaaacgtaattgtgttatattggtacagaaagaccctaagatgtaaactgaacaagtatataattgttctattttatgagataactagatatgtgtccgtgcgttgccatgaggcgatgggagcatgggtttccgt

SEQ ID NO: 5110 - DNA, 1794 bp, Sorghum bicolor
atggcgtcgtctacgagcgctaccagctgcccctgcctgctgctgacgctcttggtcctcctcctcctcatggtcatggcacgccgcgccgacgccagcgccgtgttcgccggcctgtccttcgagagccccggtgaggcggaggccttcgaggacgcgctgctgcgccaggcctgcgtcaacgtctcgttcctgtcgggtggccgcgaccgcgaggcctgcgtgtcgcggctcgacacggcccgcggcggcgcgggcagcgggcccgtgcccgtcctccgcgccgcgctccgcgacacgctcggcgaggccgtgggcgccgtgcgcgcggtccgcggactcgcctcgctgtccaaccgcccgcgcgaggagatggcggtgcgcgactgcgtcgagctcctgggatactccgtcgacgagctcgggtgggcgctggacgccatggccgagaccgacaccgagaccgacgccagcggcggcggctccgcggcgcggcgcgccgaggacgacctccacgcgtggctcagcgctgcgctcggcaaccaggacacctgcgtggagggcttccacggcaccgacggccgcctgctgcaccgcgtggaggccgccgtagcgcagctcacgcagctggtcagcaacctcctcgccatgcacaagcgcctgcgcagcatcacgccgctgctgcaccatggacctcctactaataaaaacaacggcacctccggcggcggcgccggcgacgaactgccgccgtgggtgatggacatcgaggtcgacgacggcgacaagcaggaccaggacgaggaggagctcgtcgccaagcgcgcccgcgccggcagggtgtcgacgcgcgtggacgtcgtggtggcgcaggacggcagcgggcgctaccgcaccgtcagcgaggcggtggcacgggcgcccaaccacagcaagcggaagtacgtgatctacgtgaagcgaggggtgtaccacgagaacgtggaggtgaggaagaagaagaccaacatcgtcatcgtcggcgagggcatgggcgagacggtcatctccggcagccggagcttctccagcggctggaccaccttccggagcgccaccttcgcggtggccggcgccgggttcgtcgcgcgggacctgacgttcaggaacacggcggggccggcggcgcaccaggcggtggcgctgcgggtggactcggaccgctccgccttcttccgcgtggcggtggaggggcaccaggacacgctgtacgcgcactcgctccggcagctctaccgggactgccgcgtcgccggcaccgtggacttcgtcttcggcaacggcatcgtcgtggtgcagcggagcctggtggccacgctgccgctggcgcccggccagacggggagcgtcaccgcgcagggccggaaggaccccaaccagaacacgggcttctccttccacggctgcgtggtggagggcaagtacccgacgtacctgggccgcccgtggaagcccttctcgcgggtcgtcgtgatggagtcctacctgggccctggaattcaggcccgcgggtggctcgagtgggccgctgccggctcaggggaccacagcacgggcctcgccacgctgttctacggagagtacaagaactacgggcccggggcgggcgtcgcgggccgagtgaagtggcccggctaccacgtgatcatggacgccgccgtcgccagccggttcaccgtcaggcgattcattgacgggctcgcgtggctgcccggcaccgggatcaccttcacggccgatctcttcaggaaatga

SEQ ID NO: 5111 - DNA, 1983 bp, Hordeum vulgare subsp. vulgare
ggtacactcctcgcggcaatggcgtggacatggacgacacgtggtaaaggcactcgcctgcaggtgctggtgctgctcctgctgttggcgcttctgcttgtcgcccgcggcggcgacggcgccgcggtgttctcaggatacacgttcagggggcagggcgaggctgaggccttcgaggaagcactgctgcgccaggcgtgcttcaacgtctcctcctcctcctccggcgccgggcgcggcaagggcgactgcgtctcgcgcatcgacacggcgcgcggcggtcccagcagcgggcccgtgcccgtcctccgcgccgcgctccgcgacacgctcgacgaggccgtcagcgccgttggggccgtcgccggcctggcgtccctgtccaaccacgcgcgcgaggagatggccgtgcgcgactgcatcgagctgctggggtactccgtcgacgagctcgggtggtcgctcgacgccatggccgagcccttcgacggcgcggaggcggagatggagaccgagcacggcgctgcgcccgggagcgtcggcagtggcgcgcgtgccgaggacgacatgcatgcctggctcagctccgcgctgggcaaccaggatacgtgcacggagggcttccacggcacagacggccgcctgctgcgtcgcgtcgaggcgtctgtggcgcagctgacgcagctggtgagcaacctgctcgcaatgcacaagcggctgcgcagcatcatgccgctgcgccagcgcggcaagaacgacacggcggcgtccggcgccggttcggagctgccgccgtgggtgatggacgtcgccggcggcgtcgaggaggagctcgcgcgcgcccggggccggtcgggagggaagaaggcgatgcacgtggacgttgtggtggcgcgggacgggagcgggaggtaccggtctgtcggcgaggcggtggcgcgcgcgcccaaccacagcaggaagaagtacgtcatctacgtgaagcgaggggtgtactacgagaacgtggacgtgaagaagaagaagaccaacatcgtgctcgtcggcgagggcatgggtgagacggtcataaccggcagccggagcttctcgagcggctggaccacgttccggagcgccaccgtcgccgtgtccggcgcggggttcatcgcgcgggacctgacgatccgcaacacggcggggccggcggcgcaccaggcggtggccctgcgcgtggactcggaccggtcggccttcttccgggtggccatcgaggggcaccaggacacgctctacgcgcactcgctccggcagttctaccgcgactgccgcgtgtccggcaccgtggacttcgtcttcggcaacggcatcgccgtgatccagcgcaccaccctcgccacgctgccgctggcgcccgggcagacggggagcgtcacggcgcagggccgcaaggacccgaaccaaaacacggggttcgccatccacaactgcgtcgtggaggcaaagtacccgacctacctcggccgaccgtggaagcccttctcgcgggtggtggtcatggagtcgtacctgggcgccggcgtgcgcgcgcgcgggtggctcgagtgggcaggggacgccggcctcgccaccctcttctacggggagtacagaaactttgggcccggcgcaggggtcgccggacgggtcaagtggccggggtaccacgtgatcatggacccggcatgggccacccacttcaccgtaagacggttcatcaacggtcttacatggctgccgtccaccggcgtcaccttcacggccgacttgatcaagaaatgacacactagcaaattgtcaatttagggatggatggccggaatcgatctattcccttatacagtattatattggaaggtaaaatctagtactccctccgattccaaaatataagatcttttagaggttttactaggagactacatatagagcaaaatgagtgaatgtacactctaaaatatgtct

SEQ ID NO: 5112 - DNA, 3727 bp, Oryza sativa Japonica Group
atggcgtccaccggcgcgctgcttctgttgctcttgtttgtgcttgcgtgcggcggcaatggcggcgcggccgccgcggtgttctccgggtgttcgttcgagagccaggaggaggccgaggcgttcgaggccgcgctgctgcagcaggcgtgcttcaacgtgacggcgttcggtggaggcggaggtggaggtgggggcgagggcggctgcgtgtcgcggctcgacacggcgcgcggcggcgcggggagtggccccgtgccggtgctccgcgcggcggtccgggacacgctcggcgaggcggtgggcgccgtggcggccgtggcggggctcgcgtcgctgtccaaccacgcgcgggaggagatggccgtgcgcgactgcgtcgagctggtggggtactccgtcgacgagctcgggtgggcgctcgacgccatggccgaccccgacggcggcgtcgccgcggcggaggaggaggatgagacggagccggagacgaggcgccgccgccgccgcggcgcgcgcgccgaggacgacatccacgcctggctcagcgcggcgatgggcaaccagggcacctgcctcgacggcttccacggcaccgacagccgcctcctccgccgcgtcgagtcggccgtgacgcagctcactcagctcgtcagcaacctcctcgccatgcacaagaagctccgcgacatcacgccgcagcaccaacaccaacaccaccaccaccccggcaacaacaacaacaagaacggcacagccgacggcgccgccgccggaggggatgacaccggcccgtcgtcggatctaccgccatgggtgacggacgtcgtcaacgatgtcgaggaggaggtcacggcgacgcgcggacgagggaggtcgtcgtcgtcgggaaggaaggcgatgcgcgtggacgtggtggtggcgcaggacgggagcgggcggtggcggacggtgagcgaggcggtggcgcgggcgccgagccacagcaggaggaggtacgtgatctacgtgaagcgaggggtgtacgaggagaacgtggaggtgaggaagaagaagacgaacatcgtcatcgtcggcgaggggatgggggagacggtcatcaccggcagccggagcatggccgccggctggaccaccttccggagcgccacgtttggtaaattctagtgcaccgcagtgatttaatttgtctttttgctaattactcctacttttgctactcattttggttacacactcgttacttcgttagtattcatatacgaataccccgctgcgttgctgcaaaaaattaagatgcatatactatatacaaataaaatataatttaattaaaaactaaaacaatttgatataattgagcttaaaataattgagattgtagattttttttagagaagaaaaaagagacaatttagactatagatctatcatccaaatgctagaaataatttaagtgatgtggtttaatgagagaagagaaaaatatcattaactatacttagtgggatgaactatatgagtatataggattagaccaacatgatcgccaaatatatagttttgaaaggctacatatatccagttggatatagaggctgggtaaaaaaatatcattctctaaaaaataaaaaaaataaaaatatagttttgaaaatatttttgttatttaaacatgtttgcaaaacatatagcccaatacctatgaatgtatatcaaccaaaagtcattgattcgagagtattgtatagaaccatgatatttgtggtctcaaggttttactaaacccttcacttttagcaagaaaatacggagttctctaaaaaaattagtgataaggaacatcctttatactctagaacaatcataaaagcgatcatacgtgcatgtatagcagcttatacctttccagcctattatctactcctatagatcgaaccgaccgaccacaatcgtgaccgcatgcaaaagtgcgcggcggcacccagtaaattagccgcacacgaaccattatgacagcaagattcacgtgtgctttgcttgcatcaagccctcatctaggctggcagataaaccggctcgtgcatatgcatgcgcgctaagaaaagaatatccttagagcatcaccaaccgtctatctatataattccccaaaactaattttgagggattttaatccaaaaatcagctccaacagatcccctactctcctacctgagttttggagttcccttcccccgattcctcgctccgtttatatgcggacgcgaaagtcgcacccaatcacgcaatcccgcctctctcccttgttcccgcgtgtggaaaatagcgatctttctacgcgtgaaagaaaaaaaacagaattttctcttggtagtttaacaaaagggtccacttttaagttttggggattaaatttaggctatctgttggaggaaggagttttttcacttcctattttcagtttagaaaacccaaaaacaaatttttaggagaaaattatagataatctgttggtgatgctttaagatgtcctcttgcaaaaagttttccatcctccacatatctagggtttgtttgttcggtttattccggactattgactattacgatgtagtagaattaattattcccttttcaaaccccctctaattcatgctacttagggattaaccgagcaatgccttagagttgatgttgtacttaaatttaaaccgcggcacaatgaaatcaaaacataaatttgaatgagattttaagtggagttaaatttgtacttcatccgtttaagttatttgaccttttcttagtcaaacttttttttaagatttgatcaagtttgcataaaaatataataacacttttaatacaaaataaacatattatcagaatatatccaatgttaaatttaattaaactaatttggtattatatatgttattgttttttcttataaatttgatcgaacctaaattttgactaactcaaatgttttataatataaaacggagggagtaactgaatttggtttgtgtgtgcgtgcgtgcagcggtgtcgggggcggggttcatcgcacgggacatgacgattcggaacacggcggggccggcggcgcaccaggcggtggcgctgcgcgtcgactccgatcgctccgccttcttccgcatcgccgtcgagggccaccaggacacgctctacgcgcactccctccgccagttctaccgcgactgccgcgtctccggcaccgtcgacttcatcttcggcaacggcatcgccgtcatccagcgcaccaccatctctaccctcccgcccgccgccggccagaacgccggcagcgtcacggcgcagggccggagggaccccaaccagaacaccggcttcgccctccatgcttgcatcgtggaggccaagtacccgacctacctcggacgcccgtggaagcccttctcccgggtggtcgtcatggagtcctacctcggcgcaggtgtccagccgcgcggatggctggagtgggacggcgacggcggcgagctcgccacgctattctacggggagtaccgcaactatgggcctggcgccaacatcggcggccgggtgcggtggcccggataccacgtgatcatggacgccgccgtcgctgtgcgcttcaccgtgcggcggttcatcgacggcctcgcttggctaccctccaccggcgtcaccttcaccgctgacctcaacaggaaat

SEQ ID NO: 5113 - DNA, 1129 bp, Sorghum bicolor
gcacaaatcacaaccagctccctgacaagaacccaaccatggcttctcccaagatgctccccctcctcctgctggccacctcgctcctcctgagctgcggcctcctggtgtccgccgactacgctcccatgaccctgaccgtggtgaacaactgcccctacccggtgtggccgggcatccaggccaactccggccacgacgtcctggagggcggcggcttcttcctcccggcgctctcccacaagtcgttcccggcgccggcgcacccctggtcgggccgcatctgggcgcgcacgggctgcaccggcgccggcgcgcagctccactgcgccacgggcgactgcggcgggcggctgcagtgcggcgggctcggcggcgcggcgcccgcgacgctggcgcaggtgaacctccaccacggcaacgaccagacctcgtacggggtgagcgtggtggacggcttcaacgtgggcctgtccgtgaccccgcacgagggccggggcaactgccccgtcctggcctgccgcaggaacctcaccgagacctgccccggcgagctgcagctgcggtccccggcggggagcgtcctcgcgtgcaagagcggctgcgaggcgttccgcaccgacgagctgtgctgccgcaacatgtacaacagcccgcgcacctgccgcgcgtccaagtactcggagttcttcaagcgcgagtgcccgcaggccttcacctacgcgcacgacagcccctcgctcacccacgagtgcgccgcgccgcgcgagctcaaggtcatcttctgccactagagctcggagcttgccagctcggtgggcgcgcgccgtcgccgtcgacaagtgtcgctaggagtcgtagtagggatttgcggtgtgcgtggtgtctagtgtgtgtgcgcttctgtgctggaatagctgtgctgtgttcttctgtaggctgtaggtaaccgggctactggccgttggatgtatgcgttgcgttctggctgcaaaactgatgtggtgctgttgctgcttactacagtttgcagtctaaaataaacttgttcgatgtgcaatgatcgttcgcgcatgttcaaatgtcgaatcactctctgtaaatcatgcagtagaacaaagaactccga

SEQ ID NO: 5114 - DNA, 1184 bp, Zea mays
gaccctcgcttcacttgtcacggactcgcgtccacaaaccacaaccagctcactcaagaacaaagaacccaacccatggcttctcccaagccgctcctcctgctcgccacctcgttcctgagctgcggcctcctggtggccgccgactacgccccaatgaccctgaccgtggtgaacaactgcccctacccggtgtggccgggcatccaggccaactccgggcacgacgtcctggagggcggcggcttcttcctcccgccgctctcccacaagtccttcccggcgccggcccacccctggtccggccgcatctgggcgcgcacgggctgcgcgggcgccggcgcgcagctccactgcgccacgggcgactgcggcgggcggctccagtgcggcgggctcggcggcgcggcgcccgcgacgctggcgcaggtgaacctccaccacggcaacgaccagacctcgtacggcgtgagcgtggtggacggcttcaacgtgggcctgtccgtgaccccgcacgagggccgcggcaactgccccgtcctcgcctgccgcaagaacctcaccgagacctgccccggcgagctgcagctgcgctccccggccggcagcgtcctcgcgtgcaagagcggctgcgaggccttccgcaccgacgagctgtgctgccgcaacatgtacaacagcccgcacacctgccgcgcctccaagtactcggagttcttcaagcgagagtgcccgcaggccttcacctacgcgcacgacagcccctcgctcacccacgagtgcgccgcgccgcgcgagctcaaggtcatcttctgccactagagctcggagggctgggctgggctgggcgcgccgcgcccgcccgtgcgccgccgccgccaacaagtgtcgctagtagaggtagtaggatttgcggtgcgtgtgttgtctagtgtgtgctggaatagctgtgggcctgtgggctgtggctgtgttcccgtcgtgtctgtggcctgtgtaggctgtctgtagtatactgggttgttggatgtatgcgttctggccgcaagactgatgtgatgctgttgctgcttactacagtttgcagtctgaaataaaaacttgtttgatgagcactgtaatggtcgttcgcgtatgctgaatcacttgctgtacttcgatcggttaaaaaaaaaaaaaaaaaa

SEQ ID NO: 5115 - DNA, 744 bp, Oryza sativa Indica Group
atgggattagaccaagctgcttctctggtcgccacctcgctcctgagctgcggcgtcatcctcgccgactacgcgccgatgacgctgaccatcgtgaacaactgcccatacccggtgtggccaggaatccaggccaactccggccacgacgtcctcgagggcggcggcttcttcctcccggcgctctcccaccgctccttcgccgcgccggcccacccttggtccggccgcatctgggcgcgcacgggctgcactggcgccggcgcgcagctccactgcaccacgggcgactgcggcgggcggctccagtgcgcgggcctcggcggcgcggcgcccgcgacgctggcgcaggtctccctccaccacggcaacgaccagacctcctacggcgtgagcgtggtggacggcttcaacgtcgggctgtcggtgaccccgcacgagggccggggcaactgccccgtgctggcgtgccgcaagaacctgaccgagacctgccccagcgagctgcagctgcgcacgccggcggggagcgtcgtggcgtgcaagagcggctgcgaggccttccgcaccgacgagctctgctgccgcaacatgtacaacagcccgcgcacctgccgctcgtccaagtactcggagttcttcaagcgcgagtgcccgcaggccttcacctacgtgcacgacagcccgtcgctcacccacgagtgcgccgcgccgcgcgagctcaaggtcatcttctgccactag

SEQ ID NO: 5116 - DNA, 1001 bp, Oryza sativa Japonica Group
accaccaccactccatcacagtctgctcattagctcgagacctggtcagctcgccgccatggcttctgccaagctgcttctcctggtcgccacctcgctcctgagctgcggcgtcatcctcgccgactacgcgccgatgacgctgaccatcgtgaacaactgcccatacccggtgtggccaggaatccaggccaactccggccacgacgtcctcgagggcggcggcttcttcctcccggcgctctcccaccgctccttcgccgcgccggcccacccttggtccggccgcatctgggcgcgcacgggctgcactggcgccggcgcgcagctccactgcgccacgggcgactgcggcgggcggctccagtgcgcgggcctcggcggcgcggcgcccgcgacgctggcgcaggtctccctccaccacggcaacgaccagacctcctacggcgtgagcgtggtggacggcttcaacgtcgggctgtcggtgaccccgcacgagggccggggcaactgccccgtgctggcgtgccgcaagaacctgaccgagacctgccccagcgagctgcagctgcgcacgccggcggggagcgtcgtggcgtgcaagagcggctgcgaggccttccgcaccgacgagctctgctgccgcaacatgtacaacagcccgcgcacctgccgctcgtccaagtactcggagttcttcaagcgcgagtgcccgcaggccttcacctacgcgcacgacagcccgtcgctcacccacgagtgcgccgcgccgcgcgagctcaaggtcatcttctgccactagaatccagcgcgccaaggcgtactcggtaggatcccttccggggtgtctgtgactgtgttctaatgttcgattagctcgcgggtttagatgctggagtcgttacttacgttcgattagcccgtaatcggtgtgctgctgcttgtgttggctgcagggatgtctgtgactgtaatggtgttactgccaggtttccagcctg

SEQ ID NO: 5117 - DNA, 744 bp, Oryza sativa Indica Group
atggcttctgccaagctgcttctcctggtcgccacctcgctcctgagctgcggcgtcatcctcgccgactacgcgccgatgacgctgaccatcgtgaacaactgcccatacccggtgtggccaggaatccaggccaactccggccacgacgtcctcgagggcggcggcttcttcctcccggcgctctcccaccgctccttcgccgcgccggcccacccttggtccggccgcatctgggcgcgcacgggctgcactggcgccggcgcgcagctccactgcgccacgggcgactgcggcgggcggctccagtgcgcgggcctcggcggcgcggcgcccgcgacgctggcgcaggtctccctccaccacggcaacgaccagacctcctacggcgtgagcgtggtggacggcttcaacgtcgggctgccggtgaccccgcacgagggccggggcaactgccccgtgctggcgtgccgcaagaacctgaccgagacctgccccagcgagctgcagctgcgcacgccggcggggagcgtcgtggcgtgcaagagcggctgcgaggccttccgcaccgacgagctctgctgccgcaacatgtacaacagcccgcgcacctgccgctcgtccaagtactcggagttcttcaagcgcgagtgcccgcaggccttcacctacgcgcacgacagcccgtcgctcacccacgagtgcgccgcgccgcgcgagctcaaggtcatcttctgccactag

SEQ ID NO: 5118 - DNA, 1076 bp, Hordeum vulgare subsp. vulgare
gacagtccacagtccacagtccacagtctactgactcagaattcagggagcgcactagccagtagccacccaccaccatgggcatggcttcccctaagcttctcctcctgctcgccaccttcctcccgagctgcggcctcctcctggcggacttcgccccgatgaccctgaccgtcgtgaacaactgcccgtacccggtctggccgggcatccaggggagcgccggcagcgaggtcctggaggggggcggcttctacctcccgtcgctctcccaccgctccttcccggcgcccgcccacgcctggtccggccgcatctgggcgcgcaccggctgcacgcccgccggcggggagcagctccgctgcgccacgggcgactgcggcggccggctccagtgcgggggcctcggcggcgcggcgcccgccaccctcgcgcaagtctccctccaccacggcaatgaccagtcgtcctacggcgtgagcgtggtggacggcttcaacgtgggcctgtccgtgaccccgcacgagggccgcggcaactgccccgtcctcgcctgccgcaaggacctgacccagacctgccccggcgaactgcaggtgcgccagggcggcggcgccgtcgtcgcgtgcaggagcggctgcctggccttgggctccgacgagctgtgctgccgcaacgcctacaacagcccggccgcctgccgcccctccaagtactcggacttcttcaagagcgcgtgcccgcaggccttcacctacgcgcacgacagcccctcgctcacccacgagtgctccgcgccgcgcgagctcaaggtcatcttctgccactagagtgactccaccggcgctcgagccggtggacgtgcgccgccgccgcccgtcagtggttatctccgggatcgatgtagcgtagtgtgtgtcatctacttccactcatctgtcatgtggaagtgttcgagtaggctccggagactgccggcccggagtacttggtgatgtagtagttcggccctgtttcgatccatgtcgttggctgctctgattccactctgaaataacatacatgtttagatgggc

SEQ ID NO: 5119 - DNA, 1541 bp, Zea mays; identical to SEQ ID NO: 1145

SEQ ID NO: 5120 - DNA, 1573 bp, Zea mays
aaagctgaaagagaagctacagccagcaacagcaagcaggctgaaccaaactccagcgagcaagcaagctatagctagctagtagccaagcagaagccaaatacccaaaggcgagcgatggcgcccggaagcatcgccagccggtggcgcgagctccagggcgcggactcctggtcggggctgctggacccgctggacatcgacctgcgcgcgaacctgatcgcctacggcgagctcacgcaggccacctacgacgggttcaaccaggagcggcggtcgccgcacgccggcgcctgcgtgttcggctactccgacctgctggccggctcgggcgccgcggcggccgggagctacgccgtcaccaggttcatctacgccacgtcggcgctccccggcgtgcccgaggcgttcctgctgctgccgctgccggacctgctgcccgagtcctggagccgggagtccaactggatgggctacgtcgccgtcgccaccgacgacggcgtcgccgcgctcggccgccgcgacatcctcgtcgcgtggcgcggcaccatgcgcggcctcgagtgggtcaacgacttcgacttcacgcccgtgtccgccgcgcccgtgctgggccccgccgccgccgccaacccgttcgccttggtgcaccggggcttcctctccgtgtacacgtccagcaacccggactccaagtacaaccagaccagcgccagagatcaggtcctggcggaggtgagcaggctggtggcactgtacaaggacgaggtgacgagcatcacggtgtgcgggcacagcctgggcgcgtcgctggcgacgctgaacgccgtggacctcgcggccaacggcgtgaacgcgccgccggccgggtcgtcgcagccgccgtgccccgtgacggcgctggtgttcgcgagcccgcgcgtcggggacggcaacttcaagagggcgatcgcgtcgttcccggacctgcgggcgctccacgtgaagaacgccggcgacatcgtgccgacgtacccgccgctggggtacgtggacgtggccgtgcagctgcccatcgccacggggcggtcgccgtacctgcggcagcccgggacgatcgcgacgctgcacaacctcgagtgctacctgcacggcgtggccggcgagcagggcagcgccggggggttcaggctggaggtggaccgcgacgtcgcgctggtcaacaagggcgaggacgcgctcaaggaccagtacccggtgcccgcccagtggtgggtcgccaagaacaagtgcatggtcaagggcgccgacggccactatgcgctccaggacttcgagcagatctgatcatgcatgatgcaggtgtcgtgcgtgctggtaaactactagtacctctctatcggtcgatcacgatgtacgaataatgggcgtcgtcgatacgcatgcgtgtatgatcatccagatccaggttgtgtgtgtgtgtgatgcttctcacctcttcctcctacgaaccggagattgtgatgggaagtcagttataattataaataaaccatcctctgattgtgattgtgtcacaaaaaaaaaaaaaaaa

SEQ ID NO: 5121 - DNA, 1086 bp, Sorghum bicolor
atgacgacgcccggaagcattgccagccggtggcgcgagctccagggcgcggactcatggtccgggctgctggacccgctggacctcgacctgcgcacgaacatcatcacctacggcgagctgacgcaggccacctacgacgggttcaaccaggagcagcggtcgccgcacgcgggcgcgtgcgtgttcggctactccaacctgctgacgagctcgggcgccgcggcggccgggaactacaccgtcgccaccgacgacggcgtcgccgcgctgggccgccgcgacatcctcgtcgcgtggcgcggcaccatgcgcagcctcgagtgggtcaacgacttcgacttcacgcccgtgtccgccgcgcccgtgctgggttccgccgccgccgccaacccagccgccttggtgcaccgcgggttcctctccgtgtacacgtccagcaacccggactccaagtacaaccaaaccagcgccagagaccaggtcctggcggaggtgagcaggctgatggcactgtacaaggacgaggtgacgagcatcacggtgaccgggcacagcctgggcgcgtcgctggcgacgctcaacgccgtggacctcgcggccaacggcgtgaacgcgccgccggcgggctccgcgcagccggcgtgccccgtgacggcgttcgtgttcgcgagcccgcgcgtcggggacggcaacttcaagcgggcgttcgcgtcgttcccggacctgcgggcgctccacgtgaagaacgccggcgacgtcgtgccgacgtacccgccgctcgggtacgtggacgtggccgtgcagctgcccatcgcgacggggcggtcgccgtacctgaagcagcccgggacgatcttgacgctgcacaacctcgagtgctacctccacggcgtcgccggcgagcagggcagcgccggagggttcaagctggaggtggaccgcgacgtcgcgctggccaacaagggggaggacgcgctaaaaaaccagtacccggtgcccgtctcctggtgggtcgccaagaacaacttcatggtcaagggcaccgacggccactgggcgctccaggacttcgagcagatctga

SEQ ID NO: 5122 - DNA, 1426 bp, Zea mays
catcaatcgcatgccaagatgttgttactggttgccttctttacgcatttcctggtttcatcgctgagcagtgcggaggcggggcccccgtcgtcgtcggcaacggccaccaggtggcgcgagctgcagggcaacaactcgtggaacggcctcctggacccgctggacatggacctccgcaggtccatcatctcctacggcgagctggtgcaggccacctacgacggcttcaaccgagagcggcggtcgccgcacgccggcgcgtgcctgtacggccgcgccgacctgctgcccggtgtgggcgtggccgccgcgggccgctacgccgtcaccaggttcgtctacgccacgtcggcgctgcccgtgccggggtcggacttcccgctcctgccgctgccggagaccagggaggcgtggaccagggagtccaactggatcgggtacgtcgcggtggccaccgacgagggcgcggccgagctcgggaggcgcgacgtcgtcgtggcgtggcgcggcaccgtgaaggacctggagtgggccaacgacttcaccttcacgccggtgtccgccgcgcccgtgctgggctccgccgccgccgccaaccccttggccgtggtgcaccagggcttcctctccgtgtacacgtccagcaacgccgactccaggttcaacaaggccagcgccagagaccaggttctcgaggaggtgaggaggctgatggagttgtacaagggcgaagcgacgagcatcaccgtcgtcggccacagcctcggcgcggcgctagccacgctgaacgccgtcgacatcgccgccaacggcctgaacgaaggctccggctcctcccagcagctgccgtgcccggtgacggcgatcctgttcgcctgcccgcacgtcggggaccgcttcttccgggccgccttcgtcgggtactttcgggacctgagggccctccacgtgaggaacgccggcgacgtcgtgcctgtggtcccgccgctcgcgtacgtggacgtggccgtggcggtgctgccgatcgacacgagccggtcgccgtacctgcggtcgccgggcccggcggggacgctccacaacctcgagtgctacctgcacggcgtggccggcgagcagggcagcgccgccggagggttcaggctggaggtggaccgcgacgtggcgctggtgaacaagggcgccgacgcgctcagggacgagtacccggtgcccgcgaactggtgggtgccagagaacaggtggatggtcaggggctccgacggccactgggtgctcaaggacttcgaggaaatctaaatcgtatgcatgcatgccaagcttaacttgagaaaatgggcacatattcaacaccgatgacattttatttccaaccctgatggactttagttcattacgatagatgatcctgagcaatttggct

SEQ ID NO: 5123 - DNA, 1509 bp, Sorghum bicolor
agcaccaaaccaagcaacgcaacacaactcgctagtgtaccgtgtacgtacgtccctgcgcagcgcagccatggcatcctctggaaatggaagcatcgccgccggcatcgccaagaggtggcgcgagctccatggcgacaactcgtggaagggcctcatggacccgctggacctggacctccgcaagaccatcatctcctacggcgagctcgccgaggccacctacgacggcttcaacacggagcgccggtccccgcacgccggcgcctgcatctacggctactccgaccttctggccagctccggcgtggcggcggccggccactacgaggtcaccaggttcatctacgccacctcagggcagcccctcccggacgccttcctcgtccggccactggcggcgctcaaggacgtgtggtccagggagtccaacttcatggggtacgtcgccgtggccaccgacgagggcgccgccgcgctggggaggcgcgacatcgtcgtcgcctggcgcggcaccgtgcagagcctggagtgggtcaacgacctcaccttcacgccggtgcccgccgcgccggtcctcggcaagaaagccgccgccaaccccttggcgatggtgcacatgggcttcctgtccctgtacacgtccagccatgccggctccaagttcaacaagactagcgccagggatcaggtcttcgaggaggtgaggaggctggtggagctctacaaggacgaggagctcagcatcaccatcaccggacacagcctcggcgccgccatctccatcctcaacgccgtcgacatcgtcagcaacggcgtgaacgtgcccgccggaggcggcggctcggcggcgtgcccggtgacggccttcgtgttcgcgtgcccgcacgtcggcgaccgcttcttcagggccgccttccattccttccgggacctcagggctctccacgtcaagaacgccggcgacgtcgtgcccatgtacccgccgctggcgtacgtggacgtcgccgtgacgctgaacatcaacaccggccgctcgccgtacctcaagtggcccggtacggtgctgacgctgcacaacctcgagtgctacctgcacggcgtcgccggcgagcagggcagcgccggagggtttaagctggaggtgaagcgcgacgtcgcgctggtgaacaagggcgccgacgcgctcaaggacgagtacccggtgccggcgagctggtgggcgctcgagaacaagggcatggtgaaggatgatgccgacggcctgttgaagctcaacgacttccagcaaatctaataagccatgtgttgtgcttaattaccttccatgcatgcctgtttttttttaataaattgcagtatgattcctaaaataaaaaggacgttgttgtcaaccgccatgtgctcttatatgtatctatctagatatctagatatctagatggacacgttgtaatcaaattaaattatcgatctttatataatgatatataaatattttgtatattt

SEQ ID NO: 5124 - DNA, 1526 bp, Oryza sativa Japonica Group
aaagcacaagatttagctatcctagcaagtcgccaaaaaaaaaaaaaccaacgtagctgcaagcaacaaaacaccagccgggccatgtcgtcgtcgccgatgcttggaggcatcgccgacaggtggcgcgagctccatgggcaggactcgtggaatggcctcctcgacccgctcgacctcgacctccgctcctccatcctctcctatggcgagctcgtgcaggccacctacgattccttcaaccgggagaggcgctcgccgcacgccggcgcgtgcgtgtatggccacggcgacctcctcgccgcggcgggcgcgtccgccgccggcagctacgcggtgaccaagttcgtctacgccacgtcggggctccccgtcccggaggcattcctgctgctgccgctgccgtcgctgctgccgccggcgtggtcgagggagtccaactggatggggtacgtcgccgtggcgacggacgagggcgtcgcggcgctcgggcggcgcgacatcgtcgtggcgtggcgcggcacggtggagagcctggagtgggtcaacgacttcgacttcacgccggtgcccgccgcgccggtgctgggcgccgccgccgccgcgaacccgcgcgccatcgtgcaccggggcttcctgtccgtgtacacgtccagcaacaaggactccaagtacaacaaggccagcgccagagaccaggttcttgaggaagtgaggaggctgatggagttgtacaaggacgaggtgacgagcatcaccgtcgtcgggcacagcctgggcgcgtcgctggcgaccctgaacgccgtcgacatcgtggccaacggcgccaactgcccgccggcgagctcgtcgtcgtcgcagccgccgtgcccggtgacggcgatcgtgttcgcgagcccgcgcgtgggcgacggcttcttcaaggcagcgttcgcgtcgttccccgacctgagggcgctccacgtcaagaacgccggcgacgtggtgcccatgtacccgccgctgggctacgtggacgtggccgtgaagctgcgcatcagcaccagccggtcgccgtacctgcggtcgccggggaccatcgagacgctgcacaacctcgagtgctacctccacggcgtcgccggcgagcagggcagcgccggcgggttcaagctggaggtcgaccgcgacgtcgcgctggcgaacaagggcgtcgacgcgctcaaggacaagtaccccgtgccgccccggtggtgggtctccaagaacaggtgcatggtcaaggacgccgatgggcactgggcgctccacgatttcgagcaaatttaagctctcgatttcgaaaaatttgcaaaatggattacgtatagaagtgctcgttaatgggcttgacacgtcgaataaatgggatttccccctcatatcacataattcatttgtaaataaaactctgtccagtcaaatgcatgtgttgatttggacattgttacagatacaaaggtattgatttggacacgttgagatgtccagtaattatttcttgatgc

SEQ ID NO: 5125 - DNA, 1663 bp, Sorghum bicolor
accaatgcaaagcaccaagcaaaagcaaagaaacctgaattcctgaaccaaagcacttgcgcgagctactactactactacggcccaggtgcagccacacacgtacgccgtagccatcggcgatgcctggaagcatagccagcaggtggcgcgagctccatggcaaggactcatggaaaggcctgctggacccgctggacatcgacctgcgcgcgtccgtcatctcctacggcgagctcgcgcaggccacctacgacgggttcaacacggagccgcggtcgccgcacgcgggcgcgtgcgtgtacggcctcgcggacctgctgacggccagcggcggggccggcggcgccgccgcggcgggcggcagcaaccggtacagggtgaccaagttcgtgtacgccacgtcggggctgcaggtgcccgacgcgttcctgctcctgccgcagccggggctgcaggggcaggagccggcgtggtgcagggagtccaactggatggggtacgtggcggtggccacggacgagggcgcggcggagctggggcggcgcgacgtcgtggtggcgtggcgcggcaccgtgcgcagcctggagtgggtcaacgacctcgacttcacgcccgtgcccgccgcgcccgtgctgggcgccgcggcggacacgcacccgcgcgccatggtgcacagggggttcctgtcgctctacacgtccagtaacgccagctccaagtacaacaagctcagcgccagagaccaggttcttgaggagatcaggaggctgatggagttgtacaagcatgaagagacgagcatcaccatcaccgggcacagcctcggcgcgtcgctcgccaccctcaacgccgtggacatcgtcgccaacggcctcaactcgcccgccgccgccgccggcggccattcctcctcctcctcctcggcgcagccggccccggtgacggccatcgtgttcgcgagcccacacgtggggggtcctttcttcaaggccgccttcgcctcgttcggtgagcagctgagggcgctgcacgtgaagaaccagggcgacgtggtgccgctgtacccgccgctcgggtacgtggacgtggccgtgccgctgcccatccacacggcgcgctcgccgtggctgcgccagccgggcacgccgcagacgctccacaacctcgagtgctacctgcacggcgtggccggggagcagggcggcggcggcgccgacgacggaggagggttcaggctggaggtggaccgcgacgtggcgctggtgaacaaggccgccgacgcgctcagggacgagtaccccgtgccggtgaagtggcgggtggctctcaacaagggcatggtcaggggcgccgatggccgttgggttctcaaggacttcgagcatgtctgattcagctttattaacaagctgccgatagtcgacaaacttcggccttctaataaaggtgggtgaatgagtctgttcgccggtcatattgttaaatgattggcaaattcaacggataaattcaaatgaacaggggtgtctagaaaaagaacaagctgcctatgcatgattctgcatgctgtaatgcatgcctttttttttcaagtgtcaatcagaactcaagtactacagatgctcgttttgctgcatgttattgagtcaacattttcagt

SEQ ID NO: 5126 - DNA, 2036 bp, Zea mays; identical to SEQ ID NO: 1146

SEQ ID NO: 5127 - DNA, 2491 bp, Sorghum bicolor
ctaaaccccaaagctgtctctcaagtctcagcgatttcaaagcgacaaagcgtgaagaagctctgttcgcgtcgtcgcctccgcgtccgccacccactcaacaacgcggcggcgaatcgcggccggttcgccgccgccgccgaccgccgcctccgttccctctccagcggcccccgctccagaagcaatggcactggacctcgccgtcgggggctcggcggctcgcagggccgagacccaaaccctagcgcccgtgctgctcatgggcccgccgcctccaccgccgatcccaccgacgacgggggtgtacctcccggggcccccgcccccgggggcgctcctgtcgcgcccgatccccatggcgctcccgcgcgaggtcatcgtctacatggacgagtgtcggagccgctccctcctcaagttcatttccgacgcggggattgtgccttcgctagaggacgaacggaggagggagcgggtagtacgcgagctcggcaagatagtgatggagtgggcaaagagggtggcctacgagcagggcaaacagcactggatcacatcagccacggtgttgacctttggctcctatgccttaggggacccccatgccgaaggcggcgctggtcagggttctggccctggtttgcacatgaaaaaagttcactcgttttggaatccacgtagtagttgcacgatgctggcttgggctacggcctatggtgtggcagtatgggtgaagtcagggttctgggccttttctcgggcttgtgtggttgaggctcctattgataatgcctcagggaaggctattccctgggatcaagcatatggacctgaatctgatattgatgtcctctgtattggtccttatattgcaacactgcaacaccatttttttgttgtcctgcgacaaatgcttgaagggaggccagaagtatcagaattgcagtcaattgaaggagctaaggttccattgatgcgttttaaattcaatgggattttagttgactttccttatgttcaactcccatttatcaatgctgcagaggctatgcatgcatttgatccccatgtgctagagaatgtggatgggccaagctggagatgtctatctggagttcgtgctaatagacaaatcattcaattagttcctaatatgaagctacttggcttctttgctggaatccatttggcgattcttgctgcatatgtttgccgcagacatccgaatgctagtataaatactttgttgtctttgttcttcgatatttttgctcactggccttggcctcttccagtgagtttgctggatccgccagttctttgtcggggtcctgatgggtgctctctcatgcccataatgttgccctgcaatccaccagaattttgctcctctagtacaacagaaagtactttcagcaaaatcaaagaagagcttcggcgtggttatgctttgacaaaggataccagaagtactgattttgactggagttggctctttgcatcttttccgtatggtgcaagatacaaatgctttctccgcatagttctctctgctccattggacgaagaattgcgtgactgggttggatgggtgaaatcacgattccgcaaccttcttcttaagctggagagtcttggcgtttactgtgacccagattcctcggaacaagttgatcacaccatcactgagccaaatgttgtattcttctggggtctcgtcttcacaaggaatattcaaatctgtacaagttctctcaaagaagatttcatgaaaagcgtctgcaataacatctatggaaaggaaaaatgtgcccattcagacatcacaatggccattgttgggcctccccagctgcctaagagtatctttgatctctcagtttactcagaaaagctgccacaacatatgatggggcaccaactaatgaagcagaggtacaatgcagtgagttaggctctgctatcatattgctcgtgagcttggcttgtgaatatgacaacagtaagaagctgctgttgtttgtgacatcagatacaggattttttttctgttcatgcctctggcacaaggaatatgggagtttttgttttttgagaagctggatgtcaatagctggatctttcttcaagcatccagcaaaatagggtcattcgggcgacttattcctgttgtgaggtttgtgcaggtacatgcatattcatgtacacagcatagcaattggtatacaagtcagagggaggtaacatatagctgtatgtaaactgtaggtgtaatgtttgtacccagcggcaaaaaatgtgtaaattgctcctgttagtgctgctgctgggcacagatactgaggtctatgtggaggaggttgtgaatggtaactatagaatccaggccagtatgaaagtgttttggatcgatgcgatcaaattttgcttttgtaggccagcaaaaacttttgtgtgtccaatctaaggatttttatggtaactggta

SEQ ID NO: 5128 - DNA, 1393 bp, Sorghum bicolor; identical to SEQ ID NO: 1086

SEQ ID NO: 5129 - DNA, 1633 bp, Zea mays
ctcgcgctcattggccatctttggcttccatggagaggctcattgccggcctacttggcttcctattggttgcatcggtaggaagccatgcagctcgtgctccggatcagtactggaagtctgctcttcccaacactcccatgccgacctccctctcccaactcctcgacgccgctccagccggcggcggcacgaccgtcaacgtcggctggggcggtgttcacgtcgatgctgggcacggtaagcccgggggtacgacggttgacgtaggcaagggcggcgtcggcgtcaacgttaaccctggcaggagcggcaagcccggcggcacgacggttggcgtcgggaagggcggagtcggcgttaacgtcaacccgggatacggaaagcccggcggcaccaccgttggcgtcggaaagggtggcgttggcgttaacgtcaaccccggcaagcccggtggcacaacggtcggcgtcggcaagggcggagtgggcgtcaacgtcaatcccggcaaaccggccggtggtgccggtacaaccgttggcgttggcaaaggcggcgtgggcgtgggcgtcaatcccgggcacggcaagccgggcggcaccacggtcggcgttggcaagggcggggttggcgttcacgtgaacccgggaaagaagcccgtccacgtcaacgtctcccctttcatctacacgtacgccgcgtcggagacgcagctgcacgacgaccccagcgtggcgctcttcttccaggagacggacctccggcccggtaagaagatgaccgtccagttcgccagcaccgggacgaccggcaccaagttcctcccgcggagcgaggccgaggccatcccgttctcctcacagaaggtgcccgagatcctcgcccgcctctcggtggacccggactccgtcgaggcggcggagatggcgcagacgctgcgcgactgcgaggcgcccgcggccaagggcgagaagaaggcgtgcgccacgtcgctggagtccatggtggacttcgccaccgccagcctcgggaccaggcacgtgagggccgtgtcgaccgtcgtggcgaaggagggatcgccgaagcaggagtacacggtgaccggcgtggagcgcgctgccggcggcaccgacgacgacggccgggtcgtggcctgccacgcggagccgtacgcgtacgccgtgttcgcgtgccacctgacgccgcagacgcgggcgtactctgtgtcgatgctcggcagggacggcacggccgtggacgctgtcgcggtgtgccacgccgacacgtccggctggaaccccaagcacgtcgccttccaggtgctcaacgtgaagcccggcaccgtgccggtctgccacttcctgccgcaggaccacgtcgtctggacccgcagcggctgagtctgctggatggccgccgtttgctcgcgtcgcgccgcctggagtgatttgttatgttccagtggcctctaggcatactgtcatattattattataccgaggtatcacgagtttgcttatgtttccagtacttgatgcttgtatggatatggtgtagccagctcagcaagtatcaacccacctgcttaattctgttgtatagttttaaataaacagacaacctctttatggtt

SEQ ID NO: 5130 - DNA, 1841 bp, Sorghum bicolor
atcatcgtctgcatcgctcgccctcatttcactgggagcatcgatctatctatcagcttgctcattggccatcttcgatcgtcttccatggagaggctcattgccggcctacttggcttcctattgattgcgtcagtaggaagccatgcagctcgtgctccggatcaatactggaagtctgctcttcccgacactcccatgccgacctccctctcccaactcctcaacaccccagccggaggcacgaccgtcaacgtcggctggggcggtgtccacgtcgatgctgggcacggtaagcccgggggtacgacggttgacgtaggcaagggcggcgtcggcgtcaatgttaaccctggcagcagcggcaggaagcccggcggcaccacggtcggcgttggtgggaaagggggagtcggcgttaaggtcaaccctggctatgggaagcccggcggcacgacggttggtgtcgggaagggcggagttggtgttaacgtcaaccctggctacgggaagcccggtggcaccactgttggcgtcgggaagggcggcgtcggcgtgaacgtcaaccctggcaagcccggcggcactacggtcggcgtcggcaagggcggcgttggcgtcgacgtcaatcctggctatggcaagcccggtggcaccacggtcggcgtcggcaagggcggagtgggcgtcaacgttaatcctgccaagccgggcggtaccggcacaaccgttggcgttggcaaaggcggcgtgggcgtcggcgtcaatcccgggtacggcaagcccggcggcaccacggtcggcgttggcaagggcggggtcggcgtccacgtgaacaacccgcgcaagaagcccgtcaacgtcaacgccgggcctttccagtacctgtacgccgcatcagagacgcagctgcacgacgaccccagcgtagcgctcttcttccaggagaaggacctccagcagcccggtaagaaggtgaccgtccagttcgccaacaccgcgaccgccggcgccaagttcctcccgcgaagcgatgccgaggccatcccgttctcctccgagaaggtccccgagatcctgagccgcttctcggtcgacccggactccgtcgaggcggcggagatggcgcagacgctgcgcgactgcgaggcgcccgcggccaagggcgagaagaaggcgtgcgccacgtcgctggagtccatggtggacttcgccaccaccagcctcgggaccagccacgtgagggccgtctcgaccgtcgtggccaaggagggctcgccgaagcaggagtacaccgtgaccggcgtcaagcccgcggccggcaccggccacgacggccgcctcgtggcctgccacgcggagccgtacgcgtacgccgtgttcgcgtgccacctgacgcagcagacgcgggcgtactcggtgtcgatgctcggcagggacggcacggccgtggacgctgtcgcggtgtgccacgccgacacgtccggctggaaccccaagcacatcgccttccaggtgctcaaagtgaagcccggcacggtgccggtctgccacttcctgccgcaggaccacgtcgtctggacccgcagcggctgaggctgctggatggctgccgtttgctctcgtcgcgccgcctgatggagtgatggtttcgttttcattgtattctagtagcctctgggcatactgtttatgtttccagtatagtgcttgatgtttgtatggatggtgtggccagccagtatcgaccacctgcttagattctgttgtatagttctaaataaacaggcatgtctttacggttactgctctgagcctgaacaaacttctgttgatccccg

SEQ ID NO: 5131 - DNA, 1617 bp, Oryza sativa Japonica Group
aaaggcccatcacctgcatcgttccaagcgcagctcaatctttgcctcgtcaggttttgctcattggcgtctccatggataggctcctcgcctgcctccttggcttcctgttgatcgcttcagtaggaagccatgccgctcggactccggagcaatactggaaatcagctcttcccaactctcccatcccgagctcgctctctcagcttctcagcactgcaggcggaggcacgtcggtgaacgtcggcgggggcggcgtccatgtcgacgcggggcacggcaagcccggcggcacaaccgttgatgtaggcaagggtggcgtcggcgtgaacgtgaagcctggttacggcaagcccggcggcaccacggtcggcgtcgggaagggcggcgtgggagtcaacgtcaagcctggctatggcaagcccggaggcaccagcgtcggcgtcgggaaaggaggcgtgggcgtgaacgtgcagcctgggtacggcaagcccggcggcaccaccgtcggcgtcggtaagggcggcgtcggcgtgaacgtgcagccaggctacggcaagcccgggggcaccaccgtcggcgtcgggaagggcggcgtcggcgtcaacgtgaagccccggggcaagcctgtccacgtcaacgtcgcacctttcatctacaactacgccgcaacggagacgcagctgcacgacgaccccaacgtggcgctcttcttcttggagaaggacctccaccccgggaagacgatggccgtacatttcacggccaccaccgccggagagaagttcctccccaggagcgaggccgacgccatgccgttctcctccgagaaggtcccggagatcctcagccgcttctccgtgaagccgggctccgtcgaggcggcggagatggcgcagacgctgcgcgactgcgaggcgccgccggcgcagggcgagaggaaggcgtgcgccacgtcgctcgagtccatggtcgacttcgccacgtcgagcctcgggaccagccacgtgagggccgcgtcgaccgtggtcgggaaggaagggtcgccggagcaggagtacaccgtgacggcggtgaagcgcgcggcggccggcggcgaccaggaccagctcgtcgcctgccacgcggagccgtacgcgtacgccgtgttcgcgtgccacctgacgcgggcgacgcgggcgtacgcggtgtcgatggccggcagggacggcacgggcgtggaggccgtcgcggtgtgccacgccgacacggccgggtggaacccgaagcacgtcgcgttccaggtgctcaaggtgaagccaggcacggtgccggtctgccacttcctgccgcaggaccacgtcgtctggacacgcagcggctagctgatgatcggctgccaatcttggcgcctgatcgagttggttgcttatgctctagaatctagctaggctccatgcagatgctatactgtatggtgtcttactatcttacatatttgtatgcacgcaatttggttctttgttatttggatggtgttgccagcatcgccagcctgctagtagatgatacgggtgggcttgctgtttgatgtatagttttagtatgcgggtgcaataaacagacaagtatttactt

SEQ ID NO: 5132 - DNA, 1958 bp, Hordeum vulgare subsp. vulgare
gaacatctcctcttgtggcagttccagttgagcgagcagatcatcctcacattgcgaggggcctgccgtcagcttcctcattgctgccctctgccctgccctccatggataggctcgtcgcagccggcattcttgccttcctactgatcgcgtcggtaggaagccatgcagctcgtgctccggggcaatactgggagtctgctcttcccaacactcccatgccaagctccctctctcaactcctcgacacgcaagccggaggcacgtcggtgaacgtcggctcgggcggcgtccatgtcgacgcgggccatgggatgcctgggggcacgacggtcgatgtgggcaagggtggcgtcggcgtcaacgtgaagcctggcagcgccaagcccggcgggactacggtcggcgtcggcaagggcggcgtgggtgtcaacgtcaagcctggctacggcaagcccgggggcacaacagttggcgttggcaagggcggcgtggacgtcaacgtcaaacctggcagcgccaagcccagcggcaccggcacgacggtcggcgttggcaaaggtggcgtggacgtcaacgtcaaacctggcagcggcaagcccagcggcaccggcacgacggtcggcgttggcaaaggtggcgtggacgtcaacgtcaagcctggctacggcaagcccggtggcagtggcaccacggttggggtagggaagggaggcgtcggcgtgaacgtgaggcctggcggcggcaccacggtcggcgtcgggaaaggtggcgtcggcgttaacgtgaaacctggctacggcaagccagctggtggcaccggcacgacggtcggcgtcgggaagggcggcgtcggcgtcaacgtcaagcctggctacggtaagccaggcggcacgacggtcggcgtcgggaagggcggcgtcggcgtcaacgtcaggcctggctacggtaagccaggcggcaaaccccggggtaagcctgtccacgtcaacgtctcacccttcatatacaactacgccgcaacggagacgcagctgcacgacgaccccagcgcggcgctcttcttcctggagaaggacctccacgccgggaagaagatgagcgtccatttcatggccaccccgggcgccggagggaagttcctgccgcggagcgaggccgacgccatccccttctcctctgagaaggcccccgagatcctcagccgcttctccgtggcgccggactccgccgaggcggcggagatgaagcagacgctgcgggagtgcgaggcggcggcgggcaagggggagaagaagtcgtgcgccacgtcgctggagtcgatggtggacttcgccacgtccagcctcgggaccagccacgtgagggccgtctccacggtcgtcgggaacgggaaggaggggtcgccggagcaggagtacaccatgaccggcgtgaagcgcgcggcgggggccgaccagctcgtggcctgccacgcggagccgtacgcgtacgccgtgttcgcgtgccacctgacgcaggcgaccagggcgtacacggtgtccatggtcggcagggacggcacggcggtggaggccgtcgcggtgtgccacgccgacacggccggctggaacccggggcacgtcgcgttccaggtgctcaaggtgaagcccggcggcgcgccggtgtgccacttcctgccgcaggaccacgtcgtctggacccgccgcggctgatgaagcccggtcgacccgcgccgttggtaagcaccatatacagttgtgctttgccctatattatggtatcttgcaccctagcatcgctatatacatttcccttgtttggtacctattgtgttttgatggcgtggcgttgccagtatcgccagcttgtacggagtggcacgtttgatgtatagtttagcacgttgatgatgatgcaataaacagactggtacttatttacctctctttcaccgt

SEQ ID NO: 5133 - DNA, 1875 bp, Zea mays
ctccgcttctctcccgagtcccgactcccgagtcccgtcttctgccccgttcgctccccctcatcgcaaaaaccctaacccctcgacctctcaagatggcgtcgccgccgccgcctcccgccgcagccgcagccccagccgccgcggcgtccggaccgccgccgccggcgcaagtggtgggcaacgccttcgtgcatcagtactacaacatccttcaccagtcgccggagctcgtctaccgcttctaccaggagtccagccgcctcgggcgtccctccggcaccggcgacgacggcatggagacggtcacctccatggacgcgattaacgacaagatcgtgtccatgggcatcgaccgggcggagatcaaggcggtggacgcgcaggaatcactctgtggcggcgtcacagtgctcgtcatgggccaccttacggggaggaacagcgtcagccgcgagttcgtgcagtccttcttccttgcgccgcaggagaagggctattttgttcttaacgacatattgcgctacgttggagaggagggaggggacgaggggggcgagcagcagccggcaacggaggtcgctgctgatgtggtcgctgctgatgtggaggccgccacccctgcttctatcctggccaacggcactgtcggaggggatacagtgactgtgcctcaggatgcttcgccgcagcccgagtgccaggtggcagagcctgcacttaatccgaaggaggaagttttgaacagggaggtggtttgtaacccaccaaatgacgtgaatcctattgttgaggaaacaccggttcctgaggtcataaatgaagtgccgaataatgtaggagtggctccaccaatttcatctccctccgcaccaccggaggaggcaccaaagaagtcatatgcttcaattgtaaaagttatgaaagaatatcgaccaccagcacctgcagttccttccaggcctgcacccccgaaaacagagaagcaatcctctcctgcccccgctctggtcgctgatgctccagctttcacccctaatccccagagcggcagctttcaagatccagaagttgatgcacatgccacatatgtgcgaagtctgccattaaatgccacaccacaacaactagaggaagagttcaagagatttggcgccattaaacatgatggcatccaagttagaagcaataagatccaagggttttgttatggctttgtagaatttgaggatgccagtgcagttcaaactgcaatagaggcttctcctgttactattggtgaacgacaatgttatgttgaagagaaaagaactaccggtggttctcgtggtggtagcaggggaggaaggtttccaccagttagaggtggtaacttccgaggtgaaggtattagaggccgtggtacatataatggaggcagagggtacggaaggggcgagttcaattatcgatctgattatggaggccgaggtggcggcaggggtggctcatcgcgtggtgatgtcggctaccagcgggtcgaccactctagtgcagccagcggtcgtggtgcccgggcaccatcagccgccactgctgtcgcaaagtgagttcttggtagggtatggattgtgttttatggccaccatcattgttgaccaaaagagtggtgggtgtggtggattcgagttcatgtgaggaccatcaacaaaagacgggtcataaatttatgcttccttgttttgtggctaggcaaagcagtggtgatatcggttactaactgtagaatatacgtctgttgagatgtcctagtatgactggcttcggcgggcagctgatttgtgttttgccttttgttacttattgccaaatttatagaggttgatttgaggtgcc

SEQ ID NO: 5134 - DNA, 1844 bp, Zea mays
ctctcctctctgtttcatctcgccagctttgcgggaaaagagacaccagggacaagccccgcctcctctcccgagtcctgacgtgccccttttgctccggccccacttcctcgcaaaaccctaacccctcgatctcccaagatggcgtcgcagccgccgccccctgccgcagccgcggcatctggagctccgccgccggcacaagtggtgggcaacgccttcgtgcatcagtactacaacatcttgcaccagtcgccggagctcgtctaccgcttctaccaggaggccagctgcctcgggcgccccgccggcaccggtgccgacggcatggacacggtcaccaccatggacgcgattaacgacaagatcgtgtccatgggtatcgaccgggcgaagatcaaggcggtggacgcgcaggaatcgctctgtggcggcgtcagcgtgctcgtcatgggtcatcttacggggaggaacagcgtcagccgccagttcgtgcagtccttcttcctcgcgccgcaggagaagggctactttgtgctcaacgacatactgcgctacgttggggaggggggaggggacgagggggctgagaagcagccagcacctgaggttgctgcggacgcggagaagaccacctctgcccctatcctggccaacggcactgtcggaggagacgccacgactgttcctcaggatgcttcgccgcagcctgagtgccaggtggccgagcctgcacttaatccaaaggaggaagttctgaacggggaggtttgtaactcgctaagtgatgtggagaagcctgttgctgaggaaacgccggttcctgatgtcataaatgaagtgccaaataatgttgcagtggctccaccaatttcatcccctcctgtaccattgaaggaggcaccaaagaagtcatatgcttcaattgtaaaagtcatgaaagaacatcggccattagcacctgcagttccttccagacctgcacccccaataacagagaagcaagcctctcctgcccccactccagttactgaggctccagctttctcccctaatcctcagagcggcggctttcaagatccagaagttgatgcacatgccatatatgtgcgaagtctgccattaaatgccacaccacaacaattagaggaagagttcaagagatttggaaccattaaacatgaaggcatccaagttagaagcaacaagatccaagggttttgctatggctttgtagaatttgaggatgccagtgcagttcaagctgcaatagaggcttctcctgttactattggtgagcggcaatgctttgtcgaagagaaaaggactactggttctcgtggcggtggtagcaggggaggaaggtttccaccaggtagaggtggtaatttccgaggtgaaggcattagaggccgtggtacatacaatggaggcagagggtacggaaggggcgagttcagttaccgatccgattatggaggccgaggtggcggcaggggtggctcattacacggaggtgatgttggctatcagcgggtcgactactctggcacatccagtggacgtggtgcccgggcaccatcagcggccgctgctatggcaaagtgagttcttggtagctatgagtcggtagtagtttagttttgtggccaccatcacggttgaccaaaagagtggtgtggtgattcgagttcatgtgaggattatgaacaaaagtcaggtcataaattgatgcttccttgttttgtggcaaggcaaagcagtggtgatatcggttactaattgtagaatatacgtctgttgagatgtcctagcaaaaaaaaaaaaaaaaaatatcgataccg

SEQ ID NO: 5135 - DNA, 1171 bp, Sorghum bicolor
cgaccatcgagacacacacaacttctcctgtctgcctaccgatagctctaatagctgccctctcaagtactagctacacgatggccacctgctcctccacagtagttgcacttggtgcacttctcttctcgctccttgcaacgtgtggctcatgcgctagaccagtgagctttaacgcctccgacttcaccgccgatcccgactgggaggctgccagggcaacctggtacggtgcgcccaccggcgccggccctgatgacgacggtggcgcctgtggattcaagaacgtgaacctgccgccgttctcggcaatgacatcgtgcggcaacgagcccttgttcaaggacggcaagggctgcggctcctgctaccagatacgatgccaaaacaacgatgcctgctccggcaaccctgagacggtgatcatcactgacatgaactactaccccgtgtccaagtatcacttcgacctcagcggcacggcgttcggcgccatggccaagcccggccgcagcgacgagctccgccacgccggcatcatcgacatccagttcaagagggtgccctgcaactaccccgggcagaaggtgacgttccacgtggaggagggctccaaccccgtctacttcgcggtgctcgtcgaattcgaagacggcgacggcgacgtggtgcaggtggacctcatggaggccaactccgggtcgtggacgccgatgcgcgagtcctggggatccatctggaggctggactccggccaccgcctcaccgcgccgttctccctgcgcatcaccaacgagtccggcaagacgctggtggcgaaccaagtcatcccggccaactgggtgcccaacacctactaccgttccatcgtccagtattagcaatatataccctgctgcgcacaataataattctgtgtcattgtggttgattagtagtttggtactagtattgtattgctgcatggactgatgagctactgatgaggtcgcctcagtcagttactagtaagggtgttggtggtgcgtggcttctttaattcagggatttgaagactggggaaatggaggaagcaaagttaatttgcaaatgctttcccgcccattgtcaatgcatgtaccagtgcgattaagattataattattaatcgtattttgtgccatattgcgtc

SEQ ID NO: 5136 - DNA, 1173 bp, Zea mays
acacagaacttctcctgtcggcctactaatacagctagctagctgccctcttaggtatactgtgatggccacaaccttgtcctccacagtagtagttgcacttggtgcacctctcttcttgctccttgtaacgtgtggctcgtgcgcgaggccggtgagctttaacgcctccgacctcaccgccgatcccggctgggatgctgccagggccacctggtacggtgcgcccaccggcgccggccctgatgacgacggtggtgcctgtggattcaagaacgtgaatctgccgccgttctcggcaatgacgtcgtgcggcaacgagcccctgttcaaggacggcaagggctgcggctcctgctaccagatacgatgccaaaaccacccggcctgctccggcaacccagagacggtgatcatcactgacatgaactactaccccgtggccaagtaccacttcgacctcagcggcacggcgttcggcgccatggccaagcccggccgcaacgacgagctccgccacgccggcatcatcgacatccagttcaagagggtgccctgcaactaccccgggcagaaggtgacgttccacgtcgaggagggctccaaccccgtctacttcgcggtgctggtcgagttcgaagacggcgacggcgacgcggtgcaggtggacctcatggaggccaactctgcgtcgtggacgccgatgcgcgagtcctggggatccatctggaggctcgactccggccaccgcctcaccgcgccattctccctgcgcattacgaacgagtccggcaagacgctggtggctgaccatgtcatccccgccaactgggtgcccaacacctactaccgttctatcgtccagtattagccgctcccagctgctgcgccggccggataataatatacaattctgtgtcattgtgctttactattagtttggtattagtattgtatttctgcatgggactgatgaggcacagagctgaagtgaggtgcctcactccattgctaatttgctactaggtgttaagttggtgtgcggcttcagggagttgaagactgggaagtggaggaagcagtgctttttcccgcccattgtcgtgaatgcatgtaccagtgcgattaagattatataaattatattgacagtaaaaaaaaaaaaaaaaaaaa

SEQ ID NO: 5137 - DNA, 985 bp, Sorghum bicolor
caatctcatcagtactaagctccaccttcttaagcttggagttgctaggactgtctgtgctgcactaagacaaagatggcaacgaccttctcttcaaaggctgttgcatttgcagcgatcttctccttcctagtcacgtatggctcctgcgcccggcctgtaagttttaacgcctccgacttcaccgccgaccctaactgggaggccgccagggccacctggtatggggcacctactggcgccggtcctgacgacgacggtggtgcctgtgggttcaagaacgtgaacctgcctccgttctccgcgatgacgtcgtgtggcaacgagccactgttcaaggacggcaagggctgcggctcatgctaccagatccgatgccaaaaccacgctgcatgctccggcaacccggagacggtgatcatcaccgacatgaactactatccggtcgctaagtaccacttcgacctcagcggcacggcgttcggcgccatggctaaacctggccgcagcgatgagctccgccacgccggcatcatcgacatccagttcaagagagtgccctgcaattaccctgggcagaaggtgacattccacgtcgaggaggggtccaactccgtctacctcgcggtgctcgtcgagtttgaagatggcgacggcgacgtggtgcaggtggacctcatggaggccaactccggctactggacgccgatgcgcgagtcctggggatccatctggaggctcgactccaaccacaggctgcaggcgcccttctcgctgcgcatcacaaacgagtccggcaggacgctggtggccaatcaggtcatcccggccaactgggtgcccaacacctactaccgctccattatccagtattgatttattgcttaggacatcaattattcggggtcattgttttttgattaatttggtatgtaccgtatctatgtggaaatacattattggattgatgaggtgtctcagttta

SEQ ID NO: 5138 - DNA, 1226 bp, Zea mays
tcgacacacagatcgaacttctcctgtcgtctgcctaccagtagctagctctaatacatagcagccctcgctcgcaaggtactgcactacgatggccgccacctcctcctcctcctcctccacggtagttgcacttgcggcgcttctcttcttgctccttgtaacgtgtggctcgtgcgcgagaccggcgagctttaacgcctccgactttaccgccgaccccaactgggaggctgcccgggccacctggtacggtgcgcccaccggcgccggccctgatgacgacggtggtgcctgtggattcaagaacgtgaacctgccgccgttctcggcgatgacatcgtgcggcaacgagcccctcttcaaggacggcaagggctgcggctcctgctaccagatacgatgccaaaaccacccagcctgctccggcaatccggagacggtgatcatcaccgacatgaactactaccccgtggccaagtaccacttcgacctcagcggcacggcgttcggcgccatggccaagcccggccgcaccgacgagctccgccacgccggcatcatcgacatccagttcaagagggtgccctgcaactaccccgggcagaaggtgacgttccacatcgaggaggggtccaacccggtgtacctggcggtgctcgtcgagttcgaggacggcgacggcgacgtggtgcaggtggacctcatggaggccaactccgggtcgtggacgccgatgcgcgagtcgtgggggtccatctggcggctggactccggccaccgcctcgccgcgcccttctccctgcgcatcaccaacgagtccggcaagacgctggtggccaaccaggtcatcccggccaactgggttcccaacacctactaccgttccatcatccagtactagctctcggcggccgccgcgcaccacgatagctctgcgtccttgtgcttgattagtttggtagtgctattgtattgctgcatatgcagcatgggactgatgagcactgtgcgaggtgcctcagtcgattattactggtagatggtggtggcgtgcgcgcggccttcacggcggagttggagactgggaacgaaatggaggaaggccaagttaatttgcagatgctttcccgcccattgtccatgcatgtaatgtaccagggcgattgaaattataaattattaatggtgtgtttgttttgtggagtcgaaaaaaaaaaaaaaaa

SEQ ID NO: 5139 - DNA, 1103 bp, Sorghum bicolor
atcgaaacgcaaaaactcctcctgtcagccaaatcaatcgtagctactacacctctcgcgtaactctagcagctatggcatcctccttctccaaggtggtcgcagcacttattggtgcgctcatcttctccctccttgtcacgtatggctcgtgcgctacaccggccaacttcaccgcctccgacttcaccgccgatcccaactgggaggctgccagagccacctggtacggtgcgcccaccggcgccggccctgacgacaatggtggcgcctgcgggttcaagaacgtgaacctgccgccgttctccgcgatgacgtcgtgcggcaatcagcccctgttcaaagatggaaagggatgtggctcctgctaccagatacggtgccagaaacaccctgcctgctccggcaaccccgagacggtgatcatcactgacatgaactactaccccgtgtccaagtatcacttcgacctcagcggcacggcgttcggcgccatggccaagcccggccgcaacaacgagctccgccacgccggcatcatcgacatccagttcaagagagtgccctgcaactacccggggcagaaggtgacgttccacgtggaggagggctcgaacccggtctacttcgcggtgctcgtcgagttcgaagacggcgacggcgacgtggtgcaggtggacatcatggaggccaactccggctactggacgccgatgcgcgagtcctggggatccatctggaggctggacgccaaccataggctgcaggcgcccttctcgctgcgcatcacaaacgagtccggcaggaagctggtggccaaccgggtcatcccagccaactgggcgcccaacaactattaccgctccatcattcagtattagctctgctactacatgcgctctgattcggtgtcattggcttcattggaactgtactgtatgtaattgcatcaatcttcggtgcataggatgttgacagagttaggagatgaggaagcaagtttggatgtgctttcccgctcactgtcaatacatgaaccagtctgatcaaggttataaattactcctatatatatataaagcaacttctcagtggcattcagt

SEQ ID NO: 5140 - DNA, 780 bp, Sorghum bicolor
gttgcacttgcacttggtgcacttctcttcttgctccttgcaacgtgtggctcatgcgcgataccggcgagctttaacgtctctgacttcaccgccgatcccaactgggaggctgccagggccacctggtacggtgcacccaccggtgccggccctgatgacaacggtggtgcctgtggattcaagaacgtgaacctgccgccgttctcggcaatgacatcgtgcggcaacgagcccctgttcaaggacggcaagggctgcggctcctgctaccagatacgatgccaacagcaccctgcctgctcgggcaacccagagacggtgatcatcactgacatgaactactaccccgtggccaagtaccacttcgacctcagcggcacggcgttcggcgccatggccaagcccggccgcaacgacgagctccgccacgctggcatcatcgacatccagttcaagagggtgccctgctactaccccgggcagaaggtgactttccacgtcgaggtgggctccaaccccgtctacttcgccgtgctcgtcgagttcgaggacggcgacggcgacgtggtgcaggtggacctcatggaggcgaactctgggtcgtggacaccgatgcgcgagtcctggggatccatctggaggctggactctgaccaccgcctcaccgcgccgttctccctgcgcattaccaacgagtccggcaagacgctggtggctaaccaagtcatcccggccaactggacgcccaacacctactaccgttccatggtccagtat

SEQ ID NO: 5141 - DNA, 1311 bp, Oryza sativa Japonica Group
accaaaacaaagctcagaatcctacctgactagtactaccactactagctagtagcgagctactctctctggtcatcaagctttgagtggttggagtggtggcagctatggctttttccatctccaagaaggctgcagttgctgcactcttctccttccttgttgtcacctgcgtcgccggcgccaggccggggaacttcagcgcctccgacttcaccgccgatcccaactgggaagtcgccagggccacctggtacggcgctcccaccggcgccggccctgacgacgatggcggtgcttgcgggttcaagaacaccaaccagtacccgttctcgtcgatgacctcctgcggcaacgagcctatcttcaaggacgggaagggctgtggctcatgctaccagataagatgcgtcaaccaccctgcctgctccggcaacccggagacggtgatcatcaccgacatgaactactaccccgtttccaagtaccacttcgacctgagcggcacggcgttcggcgccatggccaagccggggcagaacgaccagctccgccacgccggcatcatcgacatccagttcaagagggtgccgtgcaacttccctgggctgaaggtgacgttccacgtggaggaggggtcgaacccggtgtacttcgcggtgctggttgagtacgaggacggcgacggcgacgtggtgcaggtggatctcatggaggccaactcccagtcgtggacgccgatgcgcgagtcgtggggctccatctggaggctcgactccaaccaccgcctcacggcgcccttctcgctccgcatcaccaacgagtccggcaagcagctcgtcgccagccaggtcatcccggccaactgggcccccatggccgtctaccgttctttcgtccagtacagcagctaagccaatgatcaagaacaagcataattcatgcctactatagcagcagcagaagcagcattagctactatacatacctctacgtacgacatttgagatcgatcgtttggccatttttatctgctcgggtattgattagctctccctcggtattgtatggatttgcatggatggttcattaatctgtcatcaggagttcgttttgagtaggtgagacgtcggttgttgggtgtcatatagacatcgctcggtgtcttgaggttgagagtgggataaggaggaggcaaagtttgcatgtgctgtcccgcccactctcactgtaccagtgtcactgtttgtgtaaccagaacaaaggtcataaattatactactagtatacagtttgctgcctggcattcag

SEQ ID NO: 5142 - DNA, 1110 bp, Sorghum bicolor
atgtctgcccagtgcaagctggttgcgcttggtgcactgatcttcttccttcttgtctcgtatggctcatgcactaggatcgtcaactttaatgcctcccacatcacggcggatccctactgggtggctgccagggccacttggtatggtgcgccaaccggcgctggcccctacgacaacggtggcgcttgtgggttcaagaatgtgaacctgcctcctttctcggccatgacatcgtgcggcaaccagcccctgttcaaggatggcaagggctgtggctcgtgctaccagatacgatgcgtcaaccaccccgcgtgctctggcaacccggagacggtgatgatcaccgacatgaactactacccagtcgctaagtaccactttgacctcagcggcacggcgtttggtgccatggcacagcccggccgcaacaacgagctccgccacgccggcatcatcgacatccagttcaggagggtgccctgcatctaccccgggcagacggtgaccttccacatcgagcacggctcaaaccccaactacttagcagtgcttgtcgagttcgaagacggcgatggcgatgtggtccaggtggacatcatggaggccaactccgggtggtggacgccgatgcgggagtcgtggggatccatctggaggatggactccaagcgccggctgcaggggcccttctcgctgcgcatcaccaacgagtccggcgagaggctggtggcttaccaggtcatcccggcgaactgggcgcccaacacctactaccgctccaacatccagtatgaggcttttggctctgctgctggacaggctattggctttggctctgctgttggactggtcattagctctgctgctggactgcacacggtaattaccggcatcattggcttgatctgtttggtattgtatcatttgcatgggattgaggtgcctcagttttaattagcacttgagaggtgacatgtcaggtgtcctacgctgtaggtggtgttttgtgtctttagagatttgacgaatgggatgtctgcctgggccgtcgtcggtccagagtttcattttctcgaaaaagaatttatgaacccaaataattttcct

SEQ ID NO: 5143 - DNA, 834 bp, Triticum aestivum
gcagtggtactttgacatggctcctctttcgtccaaggccgttgcactcgttgcactgttctccctcctcgtcacctacgccgccggcgccgggaacttcaacgactccgccttcaccgccgaccccaactgggaggacgccagggccacctggtacggcgcccccaccggcgccggccctgacgacgatggtggtgcctgcgggttcaagaacaccaaccagtaccccttctcctccatgacatcgtgcggcaacgagcccatcttcaaggacggcaaggggtgcggctcctgctaccagatacgatgcaccaacgaccagtcctgctccggcaacccggagacggtggtcatcaccgacatgaactactacccggttgccaagtaccacttcgacttgagcggcaccgctttcggcgccatggccaagcccggcctcagcgagaagctccgccactcgggcataatcgacatccagttcaagagggtgccgtgcgagttccccggtctcaaggtgaccttccacgtggagcaggggtcgaacccggtgtacttcgcggtgctggtggagtacgaggacggcgacggcgacgtggtgcaggtggacctcatggaggccaactccgggacgtggacgccgatgcgcgagtcatggggctccatctggcggctcgactctggccaccgcctccaggcgcccttctccatgcgcatcaccaacgagtccggcaagtcgctggtggccgacaaggtcatcccggccaactgggcgcccagcaccttctaccgttccatcgtccagtacagctgaagctgctgaactgaaccgaactc

SEQ ID NO: 5144 - DNA, 897 bp, Triticum aestivum
ctacccccacaactcgaagaagcagcggtactttaacatggctcctctttcgtccaaggccgttgcactcgttgcactgttctccctcctcgtcacctacgccgccggcgccgggaacttcaacgactccgccttcaccgccgaccccaactgggaggacgccagggccacctggtacggcgcccccaccggcgccggccctgacgacgaaggtggtgcctgcgggttcaagaacaccaaccagtaccccttctcctccatgacatcgtgcggcaacgagcccatcttcaaggacggcaaggggtgcggctcctgctaccagatacgatgcaccaacgaccagtcctgctccggcaacccggagacggtggtcatcaccgacatgaactactacccggttgccaagtaccacttcgacctgagcggcaccgccttcggcgccatggccaagcccggcctcagcgagaagctccgccactcgggcatcatcgacatccagttcaagagggtgccgtgcgagttccccggtctcaaggtgaccttccacgtggagcaggggtcgaacccggtgtacttcgcggtgctggtggagtacgaggacggcgacggcgacgtggtgcaggtggacctcatggaggccaactccgggacgtggacgccgatgcgcgagtcatggggctccatctggcggctcgactccggccaccgcctccaggcgcccttctccatgcgcatcaccaacgagtccggcaagacgctggtggccgacaaggtcatcccggccaactgggcgcccagcaccttctaccgctccatcgtccagtacagctgaagctgctgaactgaaccgaactcatcatttggaatcatgcatgcattggcttgatttggtatctg

SEQ ID NO: 5145 - DNA, 2075 bp, Zea mays; identical to SEQ ID NO: 1147

SEQ ID NO: 5146 - DNA, 1626 bp, Sorghum bicolor
atggaagacttgctctactactccctcaccatactcatctgcatcgcggtcatccccctcctctccaccctccgccgtccatccaccgccaccgtaacgccgccgccgctcccgccgggcccgtcgacgctactatcactaatcactccgctgctcttcctgggccgaacgaacttcggcatcgagcgcgtcctcaccgcggcacggtccaggtacggccccatcttcacgctccacctcctcccgtcccgcccggccatcttcatcgccgaccacgccgtggcgcgtcgcgcgctggtgcagcgcggcgccgccttcgccgacaggccccccgcgggcctcgccttgcgcctcttctccagcggccagcgcaacatcacgtccgccgcctacggcccgctctggcgcgtcctccgtcacaacctcaccggcaagctgttccacccgtcgcgcctcgcccggttcgccgccgcccgccgcaaagcgctgcggggtctcgtcgccgccgtcgtcgcgcggcagcagatgatggtgggcggccccgacggcggcgacggggtggccgtcgtcgtcgtcgtcgtcgaggggctgctgcaccgggccatgttccacgtcctcgtcgccatgtgcttcggcgaccgcctcgctaccgacgacgtcgtcgcggccgtcgaggcgctgcagcgggagttcctcacgtccgtgctcggcttccaggtgttcgacgtgtgtcccggggtcaccacgcgcctgttccgccgccggtgggagcagatgctgtccctccggcgccgccaggaggagctcttcgcgcctctcatacgagcgtgccgcgcgcaacgggacgccgccgccgccggcgacgacgacggcgacggcacgacgtacgtggacacgctgctggatctccggatccccgaagacggcggcaggaacctcacggagggcgagatggtgagcctgtgcgccgagttcgtcgccgtcggcaccgacaacacggccaccgaggcgcagtggatcatggccaacctcgtgacgcagccggagatccaagcgaggctccgtgccgagatccaccaggtcaccggcggcggcggcagcgcctgcatccaagaggaggacctgccgcggatgccgtaccttcgcgccgtcgtgctggaggggctccgacgccacccgcctggccacttcgcgatcccgcacgcggcgaccggcggcatcgacgacggcggcgacggcgggctgtcgctcgaaggcttccgcgtgccgaggcgcgcgtccgtcaacttcccgctcgtcgcgctggggctggacgaggcggtgtggccggacccgctgcggttccggccggagcggttcctggccggcggggaaggcgcggacgtcgacctcaccggcgcgaaggaggtcaagatgataccgttcggcgccgggcggcggatctgccccgggatggcgctcgcgctgctgcacctcgagctcttcgtggccggcctcgtcgccgagttcgagtgggtccaggtggccggtgagccggtggagttcgccgagaagcaggagctgtccgtcgtcatgcgccgcccgctccgtgcccacgtcgtccgctgcaccaggaacgccagctga

SEQ ID NO: 5147 - DNA, 1868 bp, Zea mays
ctccttcctgacattggcactggcagctgcactcaccggcagccatggaagacttgctctactactccctcaccgtagccatctgcatcgcagtcatcggcctcctctccatcctccgttcgttcaccgccaccggaccgccgccggcgctcccgcccggcccgtcgctgctgtcgctgatcaccccgctcctcttcctcggccgaacgaacttcggcatcgaacggatcctctccgccgcgcggtcccgctacgggcccgtcttcacgctctacctgctcccgtcccgcccggccatcttcatcgccgaccacgtcgtggcgcaccgcgtgctggtgcagggcggcgccgccttcgccgacaggccgccggccagcctccccttccgcctcttctccagtggccagcgcaacatcacatccggcgcctacggcccggtctggcgcgcgctccgtcacaacctcacgggcaacgtgttccacccgtcgcgcatgggccggttcgccgccgcccgccgccgcgcgctgcgggggctcgtcgccggcgtcgcgcgcgacgccggcagcagggccgtcgtcgtcgaggggctcctgcaccgggctatgttccacgtcctcgtcaccatgtgcttcggcgagcgcctcgccaccgacgccgtcgtcgcgtccgtggaggcgctgcagcgggagttcctcaagtcggtgctcggcttccaggtgttcgacgtgtgccccgcgctcaccagcctcctgttccggcgccggtggaagcagatgctgtccctccgccgccggcaggaggagctcttcgcccctctcatacgggcgtgccgcgcgcaacgaggctccgacgccaacgccggcgcggacacgtacgtggacacgctactcgacctccggatccccgaggacgggggcaggaacctcacggagggcgagatggtgagcttgtgcgccgagttcgtggccgtcggcaccgacaacacggcgaccgaggcgcaatggatcatggccaacctcgtggcgcatccggagatccaagcaaggctccgggccgagatccaccaggtcaccggcggcgcgggcgtccaggagcaggacctgccgcggatgccgtaccttcgcgcagtggtcctggaggggctccgccgccacccgccgggccacttcgcgatcccgcacgccgcgaccggcatccaagacgacgacggcggtggcgaccacgcgaccatcgaaggcttccgcgtgccgcggcgcgcgtccctcaacttcacgctcgtcgcgctggggctcgacgaggcggtgtggcccgacccgctgcggttccggccggagcggttcctgcccggcggcgagggcgcggacgttgacctcaccggcgcgaaggaggtcaagatgataccgttcggcgccgggcggcggatctgccccgggatggcgctcgctctgctgcacctcgagttcttcgtggccagtctcgtcgccgagttcgagtggctccaggtccccggtgagccggtggagttcgccgagaagcaggagctgtccgtcgtgatgcgccggccgctccgtgccaccgtcgtccggtgcacaaggaacgccaactgaccacacgggttgtcgttgtcgaaccgaacgtctgcacttttctgctcttgtttgttgctgcatgcatgtgcttttctttcagtgaagttcagcgaatttagtaaaaaattcgctaccaaatttcctgtggacttgtggagtcatgttgttagcatgccctgctcttgttggctagaggctttcatgtatttgcactgcactgctctgattgtcctaaaagttataatattaataaaaaaatcagtttttcttttgtccatc

SEQ ID NO: 5148 - DNA, 1008 bp, Sorghum bicolor
cttcctcgtttccccgctcgctcaggtagccaggtagaggtaggtgtaggtctcacagcacagcacagcacagcacggcacaggtcccctgcctcctctcctcctctgacggacatcggaggaagaagaagaagaagagggagagcgagcaggggcgggcgtggttcgggaaggaatggctggtcggcgcgcggaggaggagtacgactacctgttcaaggtggtgctgatcggggactcgggcgtcggcaagtccaacctcctctcccgattcacccgcaacgagttctgcctcgagtccaagtccaccatcggcgtcgagttcgccacacgaacactccatgttgagggcaagatcatcaaggcgcagatttgggacacggcaggccaggagcggtacagggcaatcacaagcgcctactaccgcggtgcgctgggcgcggtcctggtctatgacgtgagcaagcctaccaccttcgagaacatcagccggtggctcaaggagctgcgtgaccacgccgactccaacatcagaatcatgctcgttggcaacaagactgacttgaggcacctccgagctgtcgccaccgatgatgcgcagagcttcgccgaggcagaaggtctgtcctacatcgagacgtccgcgctggaggcaaccaacgtggaggaggcattccaactgatcctgggtgacatttaccgggccatcagcaagaagcctgtggcatcagatgagtctggccagggtgctgctggaggcgtcaaggaaggtaagaccatcaatgtggcgactggtggcgatgccgctgctgagaagaagcaatgctgctcagcttagaacccatggtgatctcgttcagtggcatatgtgttgttgtgatggttggtttttttcttttctttcagtccaaagtttgttgattcattttgtcagatagtaccttcgttggacctcatgttcacatatattctctaaagcaagcagttatatatgattataccatcacc

SEQ ID NO: 5149 - DNA, 1128 bp, Zea mays
aaatagagcccgagcgccgagggaggagggcaaaccgggagagagagagagagacacctcctccttttcccccctttgcattgggttgccgcaacactacagacacaaacacagtctaggaggcttcttccgctcgctcaggtaggtgtactgtactgtagtaggttggttctccattcatcattcagctcacaggtccctccgcctccgccgtatcggagggagaggaagcggaaggcttggaaggagaagagaatggcggggcggcgcgcggaggaggagtacgactacctgttcaaggtggtgctgatcggggactcgggcgtcggcaagtccaacctcctctcccgcttcacccgcaacgagttctgcctcgagtccaagtccaccatcggcgtcgagttcgccacacggacactccatgttgagggcaagatcatcaaggcgcagatctgggacacggcaggccaggagcggtaccgggcgatcaccagcgcctactatcgcggggcgctgggcgcggtcctggtctacgacgtgagcaagcccaccaccttcgagaacatcagccggtggctcaaggagctacgcgaccacgccgactccaacaccaggatcatgctcgtcggcaacaagaccgacctgaggcacctccgggccgtcgccaccgacgacgctcggagcttcgctgaggcagaaggcctgtcctacatcgagacgtccgcgctggaggccaccaacgtggaggaggcgttccagctcatcctgggcgacatttaccgggccgtcagcaagaagcctgtggcgtccgacgaggttggcgccggccagggaggcgtcaaggaaggtaagaccatcgatgtggcgactggtgctgatgccgccgctcacaagaagcagtgctgctcggcttagaagttagaagaacccatgctggtggtctctcgttcagtggcgtatgtgttgttgtgatggttgtcgttgttgttttttttctcttcttccagtccaaaagtttgttgattcgttttgccagatagtacctttgttggagggataatcatgctcacatatatattctctaaagcaagcagttatatatgattataccgaaaaaaaaaaaaaaaa

SEQ ID NO: 5150 - DNA, 873 bp, Oryza sativa Japonica Group
gagttgttgttgttgaggaggaagtgaagaagaggcagtagaaagaagtagcagtagcagaagagaagggaggaagggaattggatagatggcggggacgcggcgtgcggaggaggagtacgactacctgttcaaggtggttctcatcggcgactccggcgtcggcaagtccaacctcctctcccgtttcacccgcaacgagttctgcctcgagtccaagtccaccatcggcgtcgagttcgccacccgcaccctccatgtggagggcaagataatcaaggcgcagatctgggacaccgcaggtcaagagcgatacagagctatcaccagcgcttactaccgtggagctctaggagcagtcctggtctacgacgtgagcaagcccacaacctttgacaacatcagccggtggctcaaggagctccgcgaccacgctgatgcaaacatcagaatcatgctcgtcggcaacaagactgatctgaagcaccttcgggccgtcgcgacagacgatgcgcacaagtttgctgaggcagaagggctgtcctacattgagacttcagctcttgaggccacaaatgtggaggaggcattccagctgattctcggtgacatttacagggccatcagcaagaagcccgtggcatcagatgaaggcggggcaggtgccgctggaggtgtcaaagaagggaagacgatcaatgtcgctgccggtgatgccaatagtgaaaagaagcaatgctgctcaacttagaacgaatccttcagtttcagatgtcatttcgtgtaccttgtgtggtgcttgtgattgttctttctttttaagtttattaaagcttcgttgattcattttgtcagataaatatttaccttgct

SEQ ID NO: 5151 - DNA, 987 bp, Hordeum vulgare subsp. vulgare
gggttgcagtagagttgagtagatcagagcagtggtagtagagtaaagagtacgctctcttctagaaacagagagagcagaggtcttgcttacgggagaagagatcccaagcaaggcaaggcaaggcagcggagaggggaatggcgggcggcggcggggggaggagcgggcggggggaggaggagtacgactacctgttcaaggtggtgctgatcggcgactccggggtgggcaaatccaacctgctctcccgcttcacccgcaacgagttctgcctcgagtccaagtccaccatcggcgtcgagttcgccacccgcaccctccacgtggagggcaagataatcaaggcgcagatctgggacacggcggggcaggagcggtaccgggccatcacgagcgcctactaccggggagccctcggggcggtgctcgtctacgacgtcaccaagccaaccaccttcgagaacatcagccggtggctcaaggagctgcgcgaccacgccgacgcaaacatccggatcatgctcgtcggcaacaagaccgacctcaagcacctccgggccgtcaccaccgacgacgcggggagctacgccgaggccgaggggctgtcctacatcgagacgtccgcgctcgaggccatgaacgtcgaggaggccttccagctcatcctcggcgacatctaccgcaccatcagcaagaaggccgtggcctccgaggaggacagggcagcggctgccggggtcaaggaaggtaagaccatcaatgtcgccgccaccgccagcgatggcggcgaaaagaagcaatgctgctcagcttaggatggatgatgcccagcggatgtatgttgtgtaatggttgttttttgagttttaagccttgttgattcattttgtcagatatatcctccctgccttgttatagacctgaaactcacatatgttcagttactatatgatatatcaagttcattggtttatatctcagcct

SEQ ID NO: 5152 - DNA, 695 bp, Arabidopsis lyrata subsp. lyrata
tcctcgaagaaagtgtaacaatggcgagaagaccggacgaagaatacgactacttgtttaaagtggttttgatcggagactccggtgtcggcaagtcaaatctcctctctagattcactcgcaacgagttctgcttagaatccaaatccaccatcggtgtcgaattcgctactcgtactctccaagtggaaggaaggactgtgaaagctcagatatgggacacggctgggcaagaacgatacagagccataactagcgcctattacagaggtgcacttggagctcttttggtctatgatgtcactaagccaacaacgtttgagaatgtaagcaggtggttaaaagaactaagagaccatgcagattccaacatcgtgatcatgttgattggaaacaagacagatctgaagcatctcagagccgttgccacagaggatgctcagagctatgcagagaaagaaggcttgtctttcattgagacatcggctctcgaggcattaaacgtagagaaggcttttcagacgattctctcagagatttataggattatcagcaagaagtcgatatcttcagaccagacaactgcaaatgccagcatcaaggaaggccaaacaattgatgttgctgctacttctgaatcaactgctaagaaaccttgttgctcatcgtcttgaaaggctttgtttgtgttgcac

SEQ ID NO: 5153 - DNA, 938 bp, Arabidopsis thaliana
gcaataacaagccgagaaggttgaatagagaagatccaaggggaaagagaaattaaattatttatttatttctgtcatcttctccttttctatttcaaaatcccaaatctaaagcactcctcgagaaaagtgtaacaatggcgagaagaccggacgaagaatacgactacttgtttaaagtggttttgatcggagactccggtgtcggcaagtctaatctcctctctagattcactcgcaacgagttctgcttagaatccaaatccaccattggtgtcgaattcgctactcgtactctccaagtggaaggaaggactgtgaaagctcagatatgggacacggctgggcaagaacgatacagagccataactagcgcctattacagaggtgcacttggagctcttttggtctatgatgtcaccaagccaacaacgtttgagaatgtaagcaggtggttaaaagaactaagagaccatgcagattccaatatagtgatcatgttgattgggaacaagacagatctgaagcatctcagagcagttgccacagaggatgctcagagctatgcagagaaagaaggcttatctttcatcgagacatcggctctcgaggcattaaacgtagaaaaggcttttcagacgattctctcggaggtttataggatcatcagcaagaagtcgatatcttcagaccagacaactgcaaatgccaacatcaaggaaggccaaacaattgatgtggctgctacttctgaatcaaacgctaagaagccttgttgctcatcgtcttgaaaggctttgtttgtgttgcacttaaaaaaagccaaatatctatgagactttatttcaaggcttgcgttgtatttgttttctttcttttttctgttgttgataatataactcaaagataattttttatatcaattgtggagttcggaa

SEQ ID NO: 5154 - DNA, 1089 bp, Vitis vinifera
tgtccgctcagactttctctctcaggcgatttcctagggcttctgagattttcttttcttttctcgggaaggaaaagaaaaaaaacagtaaccaaaccaaacgggccagatagatggcgagaagaccggacgaggagtacgattacctgttcaaggtagttttgatcggcgattccggcgtcggcaaatccaacctcctctcccgattcactcgcaacgagttttgtttggagtctaagtctactatcggcgttgaattcgccactcgcacacttcaggtcgagggacgaactgtgaaagctcagatatgggacacagcagggcaggagcggtacagagcaattaccagtgcctactataggggtgcccttggagctcttctagtttatgatgtaacaaaaccaacaacctttgaaaatgtaagcaggtggctgaaggagttgagggaccacgctgactccaacattgtcatcatgctaattggaaacaagactgatttgaagcatctccgagcagttgccacagaggatgcacagggttttgctgagaaagaagggctttcattcatcgaaacttcagccctcgaagcaaccaatgttgagaaggccttccagacaattcttggagagatatacaggataataagcaagaagaccctttcttctgatgaccctgcacctgctggcatcaaagaaggaaagacccttgtagtcgacggatccgacaccaacacaaagaagacttgctgctcttcattctaaaaaggtgatcttagtttacccttattttcttatcctcctttttttttctcccgattggggtgttattgttttgaatctgcattttttttttccatatctacttctgaactatatttcatggtttgttattgggattatttttaaggctttttatttattggtgtgcttgcattgtggcaaaaatgaattgaggggtttcaatttggagcaagctcaacatgattgaaattagatactaggactgatacatcttccccctttcaagaagaatactcctagaacatgtagatagaatcattctactgatgattagaaagctatttccttc

SEQ ID NO: 5155 - DNA, 849 bp, Zea mays
ccaatcactcgctcttctcaagaacaatggcgagaagaccggaagaagaatacgactacttgttcaaagtggttctcatcggagactccggcgtcggcaagtcgaatctcctctctagattcactcgcaacgagttctgcttggaatccaaatccaccatcggtgtcgaattcgccactcgtactctccaagtggaaggaaggacggtgaaagctcagatatgggacacggctgggcaagaacgatacagagccatcaccagcgcctactacagaggtgcgctcggtgcgctcttggtctacgacgtcaccaaaccaacaacgtttgagaacgttagccggtggttgaaagagctcagagaccatgctgattacaacatcgtcatcatgttgatcggaaacaagacagatctgaagcatctcagagctgttgctacagaggatgctcagagctacgcggagaaagaaggcttatctttcatcgagacgtcggctctcgaggcgttgaacgtggagaaggcctttcagacgattctctctgagatttacaggatcatcagcaagaaatcgatatcttcagaccaggcaagtgccaatgctaacgtcaaggaaggtcaaaccattgatgtcgctgcctcttctgaatcaaacactaagaagccttgttgctcttcttcctgaaaggggctttcacacttcgaagccactatgtatttccttttacggcttgcattgtgttgcactagctaaacaattgcaagtaatgtataactcgaggatcattccatatgaattgtgaatttcaaatgcaagtaaattattgtctttccttaaaaaaaaaaaaaaaaaa

SEQ ID NO: 5156 - DNA, 792 bp, Glycine max
ggggttgttgtgttttgttgtgtgctgcaacacatccagaaacacaatcggtgtcgtgttgggttgggtttttttgttattaaaagaaaagaaaaggggggatggctcggagagcagaggaagagtacgattatctgttcaaggttgtactgatcggtgattctggtgttggaaaatccaatctcctgtcccgattcactcgcaacgagttttgcctcgaatccaagtccaccattggagtcgaattcgctactcgcactcttcaggtggagggaagaactgtgaaagctcaaatatgggatactgccggacaggaacgatacagggcaattacgagtgcctactaccggggtgcccttggagctcttcttgtctacgatgtcactaaaccaactacattcgaaaatgttagccgatggctcaaggagctaagggatcacgccgatgctaacattgtcatcatgttgatcgggaacaagactgatctcaagcatctcagagctgttgccaccgaggatgctcagggttatgccgagaaggaaggcctttctttcatcgagacttccgctcttgaagcaactaatgttgagaatgctttccagactattcttgcagagatataccgcattatcagtaagaaatcactctcttccaatgaccctgctgccaatattattaaagaaggcaagactatcacagttgggggggcacccgaacccaacacaaacaagccttcttgctgtacatcatcttgaaaccattgctacttgctcagtaaaaaaaaaaaaaaaa

SEQ ID NO: 5157 - DNA, 746 bp, Populus trichocarpa
acccttttcttctctcacagagctacagacagagaaagaggaggagatggcgaggagacccgacgaggagtacgattacctgttcaaggtagtgttaatcggcgattccggtgtcggaaaatcgaacatcctctcccgatttactcgcaacgagttttgtttggagtccaagtccaccatcggcgtcgaattcgccactcgcactcttcaagttgaaggaaggacagtgaaggcgcagatatgggacacggcagggcaagagcgatacagagcgatcacgagtgcctactataggggcgcgcttggagctcttctggtgtatgatgtaacaaagccaacgacttttgaaaacgtgagtcggtggttgaaggagctgagggatcatgcagattccaatattgtgatcatgttaattgggaacaagactgatcttaaacatcttagagcagtagctactgaggatgctcaaagttatgctgagaaagaagggcttgcttttgtagagacatccgctcttgaagccaccaatgttgacaaggcttttcaaacaattctttctgagatatataggattattagtaagaagacactttcttcggaagagtcagcagcacctgtgagtgtcaaagatgggaagaccattgtagttggaggacccgatcccagcactaaaaagaccacctgctgctcttcttgtggttgaatttcatatccctttgcatgatatattgaaagtttagtttttt

SEQ ID NO: 5158 - DNA, 1155 bp, Sorghum bicolor
ccctcgcccgaccttcgcccacgcgcattccgctgcctcactccgtgcctccgccgccgctttcgttgctcacgagcgagatagccggagctagcaagggagggaggaggcgatgaaggggggcggggataaggttgactacgtcttcaaggtggtgctcatcggcgactccgccgtcggcaagtcgcagatcctggcgcgcttcgcccgcaacgagttcagcctcgactccaaggccaccatcggggtcgagttccagacccggacgcttgtcatcgaccacaagtccgtcaaggcgcagatctgggacaccgccgggcaggagaggtatagagctgtcacaagtgcctactacagaggtgctttgggagctctgctagtctatgatatcacgaaacgccagagctttgaccacatacctcgctggctggaagaacttcggggccatgctgacaagaacattgtcatcatgctggtcggcaacaagagtgaccttgaagaggagcgcgctgtaagcagcgaggatgccaaggagtttgctgagaaggagaacctcttcttcctcgagacatctgcgctgcaggcgactaatgtcgagaatgccttccagaccgtcttgacagagatctttaagatccacagcaagaagaacatggcagcagacccaaaggccaatggggctgcaccttcgctggcagggaagaaggtcatcgtcccaggcccagctcaggagatccctaagagcaagtgctgcagttccatgtgacatgttctgaatttatttgggtttgtttgtgtccaaaatattctcgatatctttgtggatgtacatctatactggaataggcttagatttgaaatactggttatctttgtgttcggaacgaagggaacgatatcatagtttagatttgtcacccgtctccaaggtgacacgaggaggatagggaccgaggagaaaagctctgtttgcatagacttgttggattaattacaaaaaatagaagtgtatgcagaattattatttttacgatgccttgaaacctttgtgtacagtgagacaccgatacaatacaactgtatcaacctgcttgtgtgataacctttggtgtgcatggaccgtctgcaccgtatgggtttataattacacaaaac

SEQ ID NO: 5159 - DNA, 1147 bp, Zea mays
gtattttccaaccaagccactcgcccgaccttcatccgcattccacgcgcactccgctgcctcactccgagactccgccgctgcttccaacttccgttgcgcacgagcgaaacatccggagctagcaagggaggaggaggaggaggcgatggcggggggcggggataaggtggactacgtcttcaaggtggtgctcatcggcgactccgctgtcggcaagtcgcagatccttgcgcgcttcgcccgcaacgagtttagcctcgactcgaaggccaccattggggtcgagttccagactcggacgctcgtcatcgaacacaagtccgtcaaggcgcagatctgggacaccgccgggcaggagaggtatagagctgtcacaagtgcctactacagaggtgctttgggagctctgctagtctatgatatcacaaaacgccagagcttcgaccacatacctcgctggctggaagagcttcggggccatgctgacaaaaacattgtgatcatgctggttggcaacaagagcgacctcgaagacgagcgtgccgtaagcaccgaggacgccaaggagtttgccgagaaggagaacctcttcttccttgagacctccgcgctgcaggcgaccaatgtagaaaatgccttccagaccgtcttgacagagatctttaagatccacagcaagaagaacatggcagcggacccaagggccaatggggccgcaccatcgctggcagggaagaaggtcatcgtcccaggcccagctcaggagatccctaagagcaagtgctgcagttccatgtgacatgttgcctgaattttatttgggtttgttcgtgtccgaggtattctcagcatctttgtggatgtataatactggaataggcttagatttgaattgctggttaacttgattttcggttttgaagggaccgatatcgtagtttagatttgtcacccgtcttcaagatgacgaggatagggagcgagaagaaaacatatgtttgcatagactttgttggattttacaaaaatagcagtgtaagcacattattttttccccgatgccttgaaacccttgtgtacagtagagatggatcctaaacatcttaattacaggataaatttaatatttgaaatagatatgtat

SEQ ID NO: 5160 - DNA, 1203 bp, Oryza sativa Japonica Group
cgcgagcccgagttgcacggcaccaccaccgccttcttccttcactcgacccgaccgccgtctcgtccgtctcccccgcttcctccgcctccaaaacccccccatcccaacccgacctcctcactcgccctcccctcgcgcttcgcttcgctccgatccgaccgccgccgccgccgccgccacagcgagaagagagagagggagatggcgggcggggagaaggtggactacgtgttcaaggtggtgctgatcggggactccgccgtcggcaagtcccagatcctcgcccgcttcgcccgcaacgagttctccatcgactccaaggccaccatcggcgtcgagttccagacccgcaccctcctcatcgaccacaagtccgtcaaggcccagatctgggacaccgccggccaggagaggtatagagctgtcacgagtgcatactacagaggagcattgggagctctcctagtctacgatatcaccaagcgccagagctttgatcacatccctcgctggctggaggagctccgtggccatgcggacaagaacatagtcatcatgctggttggcaacaagagcgatcttgaagacgagcgggccgtgagcaccgaggatgccaaggagtttgctgagaaggagaacctcttcttcctggagacctccgctctgcaggccaccaacgtcgagaacgccttccagaccgtcctgtcagagatattcaaaattcacagcaagaagaacatggcagcggacccaaaagcaaacggcgctgccccatcgctagcagggaagaaggtcgtcgtcccgggcccagcgcaggagatccccaagagcaagtgctgcagttccatgtgatcttactctactcagattcagctgtatttgtgtgcctctttttgagaattttcacgcgatctttctggatgtacatccctgctcaaatagctctaggctgcgagtattgttggactattggttgtttcggtgatcaggtggacgggatagcttagaatttgtgacattttgtcacttctctcagctggagtagggtgcgagcagaggagctctatttttcataggagtgggttaatttgtgggggttaattaccaatagccatgtatgccgattgttttacatttcttaaatcctttatgtattgttacacgtattactattaatatctacttgctgctatgacaccg

SEQ ID NO: 5161 - DNA, 986 bp, Sorghum bicolor
gcgcacacgcatcccgggcactctacttccactagcgcagccgctggccgctgcctcttctctccttcgcgacccccgaaggaaagccggagcagagagcgccaccactagccagctgaggaggcatggcgggggccggagacaaggtggactacgtcttcaaggtggtgctgatcggcgactcggcggtgggcaagtcgcagatcctcgcccgcttcgcccgcaacgagttcagcctcgactccaaggccaccatcggcgtcgagttccagacccgcaccctcgtcatcgaccacaggagcgtcaaggcccagatctgggacaccgccggccaggagaggtacagagctgtgacaagtgcttattacagaggtgcactgggagctttgctggtctatgacatcaccagacgccagagcttcgatcatataccccgctggctagatgaactccgagcccatgctgacaagaacattgtgataatgctggttggcaacaagagtgatctcgaggagcagcgagccgtgagcactgaagatgccaaggagtttgccgagaaggagaatctcttcttcctggagacctctgcgctccaggcaacaaacgtagagagtgctttccaaactgtcttgacagagatcttcaaaattcacagcaagaagaacatggtgtcggagccaaagagcaatggagttgccccagcaatggcagggacgaaggtccttgtcccaggtccggcgcaggaaatcccaaagagcaagtgctgcagttccatgtgatgcttctacgtttggtgttgggtgtgttcaaaatattcatgtaatattgttttggttgtaaaccccggctgaaatgcttggattttggcgggattgtgttggtacactggtgtattttagatatttgtcacaattgtgacatgagggaaggatgtgctgatgtattggtcctcgtgttctctaattgatatgttttatccctgctgc

SEQ ID NO: 5162 - DNA, 1010 bp, Zea mays
atacaacaaccaacgaaaagcgcacgcgcacgcgcatcccggcagtcagtagcgcagctgcctctcctctctttgccccccggagccggagcaagagcgccgccaacagctcgctaccggcgccgtgtcatggcgggggctggagacaaggtggactacgtcttcaaggtggtgctgatcggcgactcggcggttggcaagtcgcagatcctcgcccgcttcgcccgcaacgagttcagcctcgactccaaggccaccatcggcgtcgagttccagacccgcaccctcgtcatcgaccacaggagcgtcaaggcccagatctgggacaccgccggccaggagaggtacagagctgtgacaagtgcttattacagaggtgcactgggagctttgctggtctatgacattaccagacgccagagcttcgatcatataccccgctggctagatgaactccgagcccatgccgacaagaacattgtgataatgctggttggcaacaagagtgatctcgaggagcagcgagcggtgagcactgaagatgccaaggagtttgccgagaaggagaacctcttcttcctggagacctctgcgctccaggcaacaaacgtagagagtgcttttcaaactgtcttgacagagatattcaagatccacagcaagaagaacatggtgtcggagccgaagagcaatggagctgccccagcgatgccggggacaaaggtccttgtcccaggtccggcgcaggaaatcccaaagagcaagtgctgcagttccatgtgatgcttctacgtttggtgctgggtgggttgaaaatatattcacgcaacattgttttggttttaaatccctgctgaaatacttgggttttggcgggattgtgttggaacaccggtgtattttagatatctgtcacaattgtgacatgagagaaggatgtgctgatgtattagttctcttgttctctaattgatacgttttatccctgctacaaaaaaaaaaaaaaaaaa

SEQ ID NO: 5163 - DNA, 1046 bp, Zea mays
tgctttgaaaaatcattcaacaaccaactaaaataagcgcacgcgcacacgcatcccggcagtcctgtccagtggtgcagctgcctgccttcagccttccctctctttcgcgacccccccggagccggagcagagatcgccagctctaccggcgcggaggcatggcgggggccggagacaaggtggactacgtcttcaaggtggtgctgatcggagactcggcggtgggcaagtcgcagatcctcgcccgcttcgcccgcaacgagttcagcctcgactccaaggccaccatcggcgtcgagttccagacccgcaccctcgtcatcgaccacaggagcgtcaaggcccagatctgggacaccgccggccaggagaggtacagagccgtgactagtgcttattatagaggcgcactgggagctttgctggtctacgacatcaccagacggcagagcttcgatcacataccccgctggctagatgagctccgagcccatgctgacaagaacattgtgataatgctggttggcaacaagagcgatctcgaggagcagcgggccgtgagcactgaagacgccaaggagtttgccgagaaggagaacctcttcttcttggagacctctgcgctccaggcaacaaatgtggagagttcttttcagaccgtcttgacagagatcttcaaaatccacagcaagaagaacatggtgtcagagccaaagagcaacggagccgcgccagcaatgccggggacgaaggtcctcgtcccaggtccggcgcaggaaatcccgaagagcaagtgctgcagttccatgtgacgcttctgcgtttggtgctgggtgtgtcgaaaatattcacgcaatattgtttttttttttgctgtaaatccctgctgttatgcttggatttttggcggggttgtgttggaacaccggtgtatttttagatatttgacacaactgtgacacgagggaaggatgtgctgatgtattggttctcttgttctctaattgatatgttttatccctgctgcaaaaaaaaaaaaaaaa

SEQ ID NO: 5164 - DNA, 1163 bp, Hordeum vulgare subsp. vulgare
gacgcgcactcctccacgacccacacgcctcgctcggtcactcctccggccgccgccaacgccgccgttctgcacgagcgaagacgatgtcgagcgtggagaaggtggactacgtgtttaaagtggtgctgatcggggactcggccgtcggcaagtcgcagatcctggcgcggttcgctcgtaacgagttcagcctcgactccaaggccaccatcggtgtcgagttccagacgcgcacgctcgtcatcgaccacaagtccgtcaaggctcagatctgggacaccgccggccaggagaggtaccgagctgtcacgagcgcatattacagaggcgctttgggagctctgctagtctatgatatcaccaagcgccagagctttgaccacatacctcgctggctggaggaactccgaggtcatgcagacaaaaacattatcatcatgctggttggcaataagagcgaccttgaagatgagcgggctgtaagcactgaagatgccaaagagtttgccgagaaggagaacctcttcttcctggagacgtccgcgctgcaggccaccaatgttgaaagcgccttccagactgtcttgtcagagatcttcaagatccacagcaagaagaacatagtgaccgacccaaaggccaatggtgctgcgccgccgctggccggcaagaaggttcttgtcccaggcccagcacaggagatcccgaagagcaagtgctgcggttctatgtaatttctgctacaaaatttgttggatttgtgtgtgttttgagaatattcacggtgtctggctatagatccccactgagtcttaggtttcaagtattggttcatttagtgagacggatggggtcggtggcagagcaagattttgcactcatctccaccgactacgaagttagggagtgagcagatgaactccattttcataggtccgagctgtgtgattgattatcaattgacgtgtatgatgactcaggacaccgcaaagcctttatgtaatgttatacatataccgagtattatatactgtatatactagcacatgctggtgcgttgcaacgggatacagttgctgcttaaaccaatcgggagcacatccctttgattgccccatcatataggttttgggcaccaaaataatactattgcaaggagc

SEQ ID NO: 5165 - DNA, 4269 bp, Oryza sativa Japonica Group
atggcgggcggggagaaggtggactacgtgttcaaggtggtgctgatcggggactccgccgtcggcaagtcccagatcctcgcccgcttcgcccgcaacgagttctccatcgactccaaggccaccatcggcgtcgagttccagacccgcaccctcctcatcgaccacaagtccgtcaaggcccagatctgggacaccgccggccaggagaggcaagcctctccccccccccccccccgccaaatctcgcaacaattccgctctccagatttcgatcctgctgtttcgcgtcatttcgttactgttcgttcatcatatcatttttctcccaattttttccggcgttcagatcgctggattagtgagctcctccgtgatacgcgcgccaattgattcaatgctagctggtgggcttacgtcacacttccatttagatcgtaggtagcagtagtagcgtacagcaacgcagcgagtggttggtagaggtggtacgacactacactagtcctagatctctgctccccgttggctgcaacggtcggggttagcttgcagtgcacactgctacctacctggtgattgggcagtgtgatgtgcgactcacctactctggagtctggatctgccctgaattatgctggtggggggtgtggtttactacatgcaaccacatttagttgcgtatgctgtcgaatttaggtgctcttgtatggtggtgggtggctgggtgggcaattgggcggatactaggagtactaaatatggagagtgcgtgtgcatttcggaagtatgtcgattatggttcatgtggttggttgtaatttgttggcacgtgaatctgacatagcgcccgatgaatgggggttattttgaattcgaagatgtccattgctgaactctgcacacttggtgtcctgtcctgctgtatataccaaaggtccatgggatgtttatatatgctttgacatgacccttaaatgtgattgtagttagtacttttactccctccgttttaggttataagactttctagcattgcccacattcatatatatgttaatgaatctaggcacacatatatgtctagattcattaacatatatatgaatgtggccaatgctagaaattcttataatatgaaacggaggaagtacgtactttgatgaaaagaatttgttgtgcccgtgtgctctgtgttgtactcttttgataagcttaaccaatgcatggactgaggccagtgtcatgctccaacttaagctgtgtatttccttcaccaacaataactctcgtgttttagttatggctgattcattcctttcatgaagccacatcatctcaactgtttcggatctttggatgatcgatctaaggcgcaaaagcgcctagctgcacagcaaatcaacattgcacctcttgttagcattttatcatgttattttttcaagcaatttgaagggtttccatcacgtttcataagtattctagtccctagcaagtgtgcagcaatgtattcttttttgttctgatgacaccactatatccatcttagcagtcaggtacaatcttgtggacgatgataaagttagcaagttacatagttagccttatcaactatgttgatgcactgttcaactagcaagcatctgtgttcattcatgctactagcatattctgtcttttgagttccatacctgtgtttctacatttcacatttccactagtactaggtataaattgttataatcttcagtaataccttttctgtttgaggtatttgaaacattccctgaatcctgacattcttatagcatataaaattgtttatgccctgtatagcttaaccttttcaggacttgaatgtgctgcatagataaattcatatgttatcgtgtttaggaatatctaaattttggggacactggtacaaatatcatatggctatcaacatccagggatcaatatataagttaaaaactatttttctctgagctagttttttagctagttacttgtctcaactagacaggaacttgcctgcgaaattaaaacattgacaggtactaaccaagtccacttatcaattactactaaatctttgaacgcttggttgctcaaacagacatatggtcattcaagctggtcagattcatgaatagcttttccaaggcattttcactgaatgtcaccactggatatgtaaatgcactggctctttttttttttaccggaaccactgcaggggaggcccccgcagttaatatattatattaaaaagatcataagtacagaccaaaaactaaaattgcaatgcatggctcatttgccaacatgatcttcacggggaatggttggtcgcaatgcttgttccataatcttttgtttgaggaatgaactaaaactttggtgccacttttgttcagtgcacagtactttctttgagctatacacattccccttggtgtgtaactgcaaccagttcactctagtttagatgtctagctgatattaccataatatagttgttttttttttaattctggttgacataagagcaaggataatagtgagctataagcaagctatatgcttatgtggaagagagagataaacaaaagtggggagtgttggctcttatgcaagagctaactacacacaagctccaagaaatatgcattaaattcatagtgagaaagagagaggatgaaaaaaataaagataaccttatagctaacctattatacatgttagctttaacattgactaatactccctccgtcccaaaaaaagtgaatctaggactgaatgtgacatattctagtacaacgaatctagacatacaggatgtgtcacatccagtattacgttggttttttatgagatggagggagtagtaagtagtgagctctactattaaacttgctctaagccttgttgtttttactcagtaacatacatattgaaatattgaatttcacattcatatgccctagaagtgaaccaaggtttggagaacttgagtggagccagcctaaagtgcttttttttttctcttgaaatttgtctggaggtttattagttaatctcctaaggaagaactatttagttccaaagtttgatggttgttctcattcttatctaaaatatcttctatatcaaccaaactagagaattatctggttccctctctgtactgaccactttttgtgattttaaggtccatgacatcatcccaacttcattgctactgggtttttgagttgcccatatgtatttatgtacaattacctgcaaaatatctgtatggtggttcaatattttaatagagaatgagttatgatttgcaacagttttttttttcttctgaaatgttcccctaagccttcctacttttgatattctctataatcttgtcattgtattatttctgactactcaaatgtgtatccatggtaaccatagccttaaaattcttttatgctgcttcgtttgctttgttttccctgtcatttgaactgcattctgttctgcatttgagcacatgacacacaataggtgtgcgtgctgtattatccatgaaatcttagtcctgcactttagagaacttctctatttttactgtcatcatgtgaagaaacagtactccaagatcacagtgagacaaaatatatacgtattttctgtatatatgttgtagcactcaaaatgtgtgatgaattttgtggcagtattggcattcatctgttttgtctttctcatgtagcttacaaacttgtttctttcatgaacacaacttactaacctgtcatgcctatttacttcaactactgcaggtatagagctgtcacgagtgcatactacagaggagcattgggagctctcctagtctacgatatcaccaagcgccagagctttgatcacatccctcgctggctggaggagctccgtggccatgcggacaagaacatagtcatcatgctggttggcaacaagagcgatcttgaagacgagcgggccgtgagcaccgaggatgccaaggagtttgctgagaaggagaacctcttcttcctggagacctccgctctgcaggccaccaacgtcgagaacgccttccagaccgtcctgtcagagatattcaaaattcacagcaagaagaacatggcagcggacccaaaagcaaacggcgctgccccatcgctagcagggaagaaggtcgtcgtcccgggcccagcgcaggagatccccaagagcaagtgctgcagttccatg

SEQ ID NO: 5166 - DNA, 1024 bp, Populus trichocarpa
aagcaaagcaaaacaccactgctaagatctactagctagccatagcaaagcatagcaagaatcgctctcttctttagaagaaacaaaggaaacccatttgaattgagggtgagaaaatggctagtgggggtggatacggagatgcgagccagaagatagactatgtattcaaggtggtgttgataggggactcagcagttgggaaatcacaaatacttgctcgatttgctagaaacgagtttagtcttgactctaaagctactattggggtcgagtttcaaactcggactcttgttattgatcataagagtgttaaggcccagatctgggatactgctggtcaagaacggtatagagcagtcacaagtgcatactacaggggtgctgttggggcaatgctggtgtatgacataaccaagcgtcagacctttgatcacataccacgctggctggaagagctgcgaaaccatgctgacaagaacatagttatcattttgattgggaacaaaagtgatcttgaggaccagcgggctgtacccactgaggatgccaaagaatttgcccagaaggaaggactattcttcttagagacctctgcattgcaagcaactaatgttgagaatgcctttatgactgtgctgacagagatcttcaacattgtaaacaagaagaacctggttgctggtgaagatcaaatcaatggtaaccccgcatcgctatctggcaagaagattatcattccaggccctgcacaagaaattccagcgaagagcaagtgttgtagctaattgtgatctctgatcagtctgggctttgaaaccgcgtgcttccccttaattcctaatagcaattttttgaaaggtgtgatgtagttctttgtaaattttacattcttataatttagcttgcatgagcagctgattagtatcttattttgaggaaaatctgagtcgcgttttatcttctcctcaatctcattcggaaagaaaaaaattcataatgtcgatgaatgttttgaatactt

SEQ ID NO: 5167 - DNA, 978 bp, Vitis vinifera
ctgatcttgaatctagacagagagtgttcgagagagagagaacggagtggtgcggtgatggcgagtggtggaggctatggcgattcgagccaaaagatcgactacgttttcaaagtggttctgatcggagactccgccgtgggcaagtcgcagatactggcacggttcgctaggaacgagttcagtttggattccaaggctacaatcggggttgagttccagactcgaaccctcgtcatccaacacaagagtgtcaaggctcagatctgggacactgccggccaagaacgatacagagccgttacaagtgcgtattacaggggtgctgttggtgcaatgctggtttacgacataactaaacgccaaagttttgaccacataccccgatggctggaagagttgcgtggtcacgctgataagaacattgtcatcattctgattggcaataaaactgatcttgaggaacagcgagcggtacccacagaagatgctaaggaatttgctgagaaggaaggactattcttcttagagacctcagcattagaagcaactaatgtcgagaatgccttcttgaccgtattgactgaaatcttcaacattgtgaacaagaagaacttagttgcaggcgaggatcaagcaaatggcaatcctgcatctttgactggtaagaggatcactatccccggccccgcacaagaaattccagctaagagcaacatgtgctgtaaatcttcatgatttgattagattgtggctttcaaaatgtgggattgaccctaggctccttatagtaatttttgagaattcggctatagtttgtttatatattttttatttcttttatttaactctgtctagctctagcagcagagttgttgcatgttttgagatgggagatagaacaaaaaacgaagttgaaatgtagattgcgttttgctggccatttatcttaaatttaagttttacggactctttcaa

SEQ ID NO: 5168 - DNA, 1261 bp, Zea mays; identical to SEQ ID NO: 1148

SEQ ID NO: 5169 - DNA, 1185 bp, Zea mays
aatatatatggggtaataatatatagcaaatctagtacacatgtatatgtatgtatagcttattaacttatttctgcacagcttcggaagggaaaatatatgagaacgaacatttgctacaaaagaaaaactaattgctcgataaccgcgcgagcgagggggcgatgttgatcccccgcgccgcactagccagtacgaacgaaaacgaacgaacgaagcgcgcgccggtcgtcgtcgtgggctcgtggcgcagcgacgactcacacgtcgacggtgcagtcggccgggtgcgtgaacttgagggagacggtggtgttgacgccggcggggactaccccggacgcggcgctggcggcgaagacgcctccgccggcggcggcgccggcgctgccgctggtggcgagcagcgcggggcagttgacgaagaggtggtagctgcccgagacccagctgccgaccttccacttgacgcggccgtccaccctgacgtggagcagcacgtatcccgcctcgatgtcctgcttcatggcgtccgccacgtactgcgccacggggaccgcgtcgcccgacatgaccggcgaccacaccgacacgtccttgtggccctggtagatcgccggcatcgacacgggtaccgtcaccgcctcgtcgcggtacgtggtgaacgcgtccagcgtcttgtagtacacgcccacccgctcgttcgggttccgcgacgcgatcgtcacctgcgtgtgtgccgtgtgcgtcccaaatcaatgcatatgcatgcacgcgcgctcgtgcatcaatcagctgacacgtcgtacgacgacacacgccgtcgtcgtcgcgcgcgagatcgtacgtacctggaggtcgagggagagcgccgggtcgctgaggtcgatggagcgcagctgcacgtcctgcaggtagaaggacggcttggaggggcgcagcgccaggtagatgacgagcacgatgaagcctacgacgacggccagcgtcaggatgcaggcggcgatggagccgcagcagcgccggaggatccagtcgcggtggtgcttctccttgctcatggtgaccagcgagcagctgcggtggtggcgccggcgctggactgggagctctgagctcagctggctgccttgctgctatagctagcttaggagtgtgcgcgcatgtgggctgcctatagcagtg

SEQ ID NO: 5170 - DNA, 1041 bp, Zea mays
gcagcaaggcagccagctgagctcagagctcccagtccagcgccggcgccaccaccgcagctgctcgctggtcaccatgagcaaggagaagcaccaccgcgactggatcctccggcgctgctgcggctccatcgccgcctgcatcctgacgctggccgtcgtcgtaggcttcatcgtgctcgtcatctacctggcgctgcgcccctccaagccgtccttctacctgcaggacgtgcagctgcgctccatcgacctcagcgacccggcgctctccctcgacctccaggtgacgatcgcgtcgcggaacccgaacgagcgggtgggcgtgtactacaagacgctggacgcgttcaccacgtaccgcgacgaggcggtgacggtacccgtgtcgatgccggcgatctaccagggccacaaggacgtgtcggtgtggtcgccggtcatgtcgggcgacgcggtccccgtggcgcagtacgtggcggacgccatgaagcaggacatcgaggcgggatacgtgctgctccacgtcagggtggacggccgcgtcaagtggaaggtcggcagctgggtctcgggcagctaccacctcttcgtcaactgccccgcgctgctcgccaccagcggcagcgccggcgccgccgccggcggaggcgtcttcgccgccagcgccgcgtccggggtagtccccgccggcgtcaacaccaccgtctccctcaagttcacgcacccggccgactgcaccgtcgacgtgtgagtcgtcgctgcgccacgagcccacgacgacgaccggcgcgcgcttcgttcgttcgttttcgttcgtactggctagtgcggcgcgggggatcaacatcgccccctcgctcgcgcggttatcgagcaattagtttttcttttgtagcaaatgttcgttctcatatattttcccttccgaagctgtgcagaaataagttaataagctatacatacatatacatgtgtactagatttgctatatattattaccccatatatatttaatatgaaaacctcacagtttgaatc

SEQ ID NO: 5171 - DNA, 1754 bp, Sorghum bicolor; identical to SEQ ID NO: 1149

SEQ ID NO: 5172 - DNA, 1769 bp, Zea mays
acgaccgagcaatggcgctcaccgccgtcctaccttcatatacctagcagtgtctctgcatagaaagataaaaggtaggaggaggcgcagtgcgtggtgggattatttgtgaggagatattggagttattatatatatatatataggtagacgatagatagacagctagatctatataaccatggtggatgggttccgatggatcagaccgggctctttcgtcctgtacttggtcttcttcttcctgtccgcagccctgtcggaggccaatatcggcgacttcgatgaatactggcagcagcgcaagctcatggccgacgccgcggctgaggccacgtacaagcatgacccggtcgaggtcgccaaccaacttaaccgtgcagtccacagatccgtcgagaaggatgacattggcacgaggcgggagatgatggggacgacgacgaggaagtctaagttcagcgggccgtgcagggcgacgaacccgatcgaccggtgctggcggtgccggcaggactgggcgacggaccggaagcgcctggcgcggtgcgccaaggggttcgggcgcaacaccaccggcgggctggccggcaagttctacgtggtgacggacggcaccgacgacgacgtggtgaacccgcgccccggcacgctccggtggggcgtcatccagatcgagccgctgtggatcaccttcgccaagaccatgatcatcacgcttaaggaggagctcatcatccgcggcgacaagaccattgacggccgcggcgtgcaggtgcgcatcaccaacggcgcgcagctcacgttgcagttcgtcaacaacgtcatcatccacaacatccacatcaacgacatcgtctcctccaacaaggacggcggctacgtccgcgactcgccggaccacttcggctggcgcaccgtctccgacggcgacggcatcaccgtcttcggctccaccaacgtgtggctggaccacctctccctctccaactgccaggacggcctcatcgacgtcatcgccaagtccaccggcgtcaccatctccaactgccacctcaccaaccacaacgatgtcatgctcttcagctccagcgacaagcatcccgaggaccagatcatgcagatcactgtcgccttcaaccacttcggcagaggcctcgtgcagaggatgccaaggtgccgctggggcttcttccacgtggtcaacaacgactacacgcactggctcatgtacgccatcggcggcagcaaggcccccaccatcatcagccagggcaaccgctacatcgcgccgcccaaccttgccgcgaagcaggtcaccaagcagcatgacacgccggagtcggtgtggaaaaactgggtgtggcactccgagaacgacctcttcatggaaggcgcctacttcaccgtcaccggcggccagatcaacaggcagttcaacaagaaggacctcatcaagcccaggaacgggtcctacgtcaccaggctcacgcgctacgccggctccctcgcctgcacgcccggcaagccctgctagatcaagccaccagcgaggacggccgacgaccagaggcagaccatgcattcgcctgctcgccatgtaagaaacaggggagttgaaagtgcgacacaccagagaacgtgtctgtgtatactgtgtaaaggtcctaaaggaaagagaagatgcacatattcaaagcctcggaactaattgctctgttgtccactatgttatccaagtatatatttgttcaaaaaaaaaaaaaaaa

SEQ ID NO: 5173 - DNA, 2075 bp, Oryza sativa Japonica Group
gcacaggccgagcaatggagctcatcgtcctaccttcacacagctgaaaaaattccctcatatacaagataaaggtaggaggagggccgggagctcgacggatttcgatcaattgtggtttttttttgtggtaaccgtataagagaggagattttgtttaacgtagctagatcatatctgagttgagttttagcaatggaggtgctgatccggtggagcaagctgccggcggccggctccttggtgctgtacgccgtcttcttattgctgtcggcggcagccacatcggaggccaacatcggggagtacgatgagtactggcagaagcgcaagctcatggctgatgccgccgccgaggctacctacaagcgtgaccccttcgaggtcaccaacagcttcaaccgcgccgtccacagatcggaggaggagagcgggaggagggagctggcgatgacgaagaggaagaagttcgcggggccgtgcaaggcgacgaacccgatcgaccggtgctggaggtgccgcgccgactgggtgacggacaggaagcggctggcgcggtgcgcgcaggggttcggccggaacaccaccggagggctggccgggaagttctacctggtgacggacggcaccgacgacgacgtggagaacccgcgcccggggacgctccggtggggtgtcatccaggacgagccactgtggatcatcttcgccaaggacatgatcatcaacctcaaggaggagatgatgatcaacagcgacaagacgatcgacgggcggggagcgcaggtgcggatcaccaatggcgcgcaggtgacggtgcagaactccaacaacgtgatcatccacaacatccacatccacgacatcttgcaaggcaagggcgggatgatccgcgactcgccggagcacttcggcttccgcacccagtccgacggcgacggcatcagcatcttcggctccaccaacgtctggctcgaccacctctccctctccaactgccaggacggcctcatcgacgtcatcgccaagtccaccggagtcaccatctccaactgccacctcaccaaccacaacgacgtcatgctcttcggctccagcgactccttcagcgaggaccagatcatgcagatcaccgtcgctttcaaccacttcggccgcggcctcgtccaaagaatgcccagatgccgatggggatttttccacgtggtgaacaacgactacacgcactggctcatgtatgccatcggagggagcaagaacccgacgatcatcagccaggggaacaggtacatcgcgccgccaaacctagcggcgaagcggatcacgaagcagctcggggcgacggaggaggagtggaagaactgggtgtggcactctgaggaggacctgttcatggagggggcctacttcaccacgtccggtggcccgatccagaagcagttcagcaacaaggatctgatcaagcccaagcccggatcctacgtcacgaggctcacccgcttcgctggctccatcccatgcgtggccggcaagccgtgctagagcgcggtggccggcccccaccggatccacggctagccggagatgattcttattttgtagttgtgtgagcttattttttcttctacacatacgtacttactcaagaaatcttgatctgtggccggccgggttctggtcaatgtgatcctataggttctacatataaaaaagttgtattaattaaaagcatttttggaagcggtggcgatgcaaatttagagggcgatagggcgaggagcatgcatgtttgtgcgtataggtctacttgttgatggtgatcacgaaagagccaatgcattgtcatgatagaggacatgcgcatttatgcagaaggccctagggcaggaattatttttttttcattgattgttttaaatgtattgtactgaaactacattgttgtttcattaactgcacgcatctccaatgcaaagtgctaatgtaaggtgtttaatatatagtgctaatgtaaagtgcaatgaagcatctcactactatagaagatgacttcagtgtcgggtcgtaacccctca

SEQ ID NO: 5174 - DNA, 1898 bp, Hordeum vulgare subsp. vulgare
gaagcaatgtccctgatggagctcaccgtcctaccttcatacacctaaaaatcaaagccatcacgaggtaggaggaggggagctcgatcgatcgcagcggtgaataataatctagtaagggaacaatggaggggttccagtggagcaggcccgtctccttgctcctgtacgccgtcttgttcctgtcggcggcggccgtgtcggaggccaacatcggcgagttcgacgagcactggcagcggcgcaagctggaggccagagcccgcgctgaggccacctaccaccccaaccccatcgaggtcgccaacagcttgaaccgcgccgtccacagatcccttagggacgagagcggctcgaggaggaagttgctgggactgcacaagaagttcgccgggccgtgcacggcgacgaacccgatcgaccggtgctggcggtgccgcaaggactgggcgacggaccggatgcgtctggcgcggtgcgcgcaggggttcgggaggaacgccacgggcgggctgggcgggaagatctacatcgtcacggacggcaccgacgacgacgtgctggagccgcggccgggcacgctccggtggggcgtgatccagaacgagcccctgtggatcatcttcgccaggcccatgctgatcaagctcaaggaggagctgctggtaggcagcgacaagaccatcgacgggcgcggagcgcaggtgcgcatcgccgacggcgcgcaggtcaccgtgcagtactcgcacaacgtgatcatccacaacatccacgtcaacgacctcatcgtgggcaagggcggcaggatccgggactcgccgcagcatgccgggttccgcacccagtccgacggcgacggagtgagcgtcttcggctccaccaacgtctggctcgaccacctctcccttgccacctgccaggacggcctcatcgacgtcatcgccgaggccaccggcgtcaccatctccaactgccacctcaccaaccacaacgacgtcatgctcttcggctccagcgacagcaaccccaaggaccagatcatgcaggtcaccgtcgccttcaaccacttcgggagaggcctcgtgcagagaatgccaaggtgccgatggggattcttccacgtggtgaacaacgactacacccactggctcatgtacgccatcggcggcagcaagaacccgaccatcatcagccaggggaaccgctacattgcgccgccgaacctggcggcgaagctgatcacgaagcggctgggcgcgtcggaggcggagtggaagaactgggtgtggcactcgcaggacgacctgctgctgaacgacgccgtcttcgccgacagcggcggtgccaacgagaggaagttcgacaaggatgacctcatcacgcccaagccgggatcatacgtcaccaggctcacgcgcttcgccggctgcttgccttgcaagcccggcaagccctgctaaatctaggtggcaccgccggccggagtcgacgatcccttcggaatcttcaatctatagctttgttcaattttttaaactcaaaatcgtgtatgtattactaggacatttgagtagtctacggggttcaaatcagagcaccctgcaggttgttcttgtacatgcattcgccgtgtcagcagcaggcgacgcagaggggataacggacagagagaaacatgtttctgtctaggtcatgctgcttacttaggggagaaatggagggcccgacagaaagcatgcacatattgaaggggccgagactaatttgttaacggtcatctgaaggtttattgtttatctattttcattatatttcaacttactatatacgtacatatgtgcagaacacacaagtcaacatgtgtgccattttcaacgcacggaagaaaacattttcag

SEQ ID NO: 5175 - DNA, 1922 bp, Sorghum bicolor
ctttccctcctctcgccagctttgcgggaaaagagagacaaaccccgcctcctctccgcctctctcccgagtcccgacctgctctttcgccccccgccccacttcctgccaaaaccctaacccctcgacctccaagatggcgtcgccgccgccgccgccgcctcccgccgcagcctctgccccacccgccgcggcgtccggatcgccgccgccggcgcaagtggtgggcaacgccttcgtgcatcagtactacaacatcctgcaccagtcgccggagctcgtctaccgcttctaccaggaggccagccgcctcgggcgccccgccggcaccggcgccgacggcatggacacggtcaccaccatggacgcgattaacgagaagatcgtctcaatgggcatcgaccgggcggagatcaaggcggtggacgcacaggaatctctctgtggcggcgtcactgtgctcgtcatgggccaccttacggggaggaacggcgtcagccgcgagttcgtgcagtccttcttccttgcgccgcaggagaagggctacttcgttctcaacgacatactgcgctacgttggggagggggtaggggacgaggggaccaagcagcagccggcaccggaggttgctgcggatgtggagaccgccacccctgctcctatcctggccaacggcactgtcggaggggacacagggaccgtgcctcagaatgcttcgccgcagcccgagtgccaggtagctgagcctgcacttaatcaaaaggaggaagttgtgaacggggaggaggtttgtaacccgacaaatgatgtggagaagcctgttgttgaggaaacactggttcctgaggacataaatgaagtgccaaataatgtagcagtggctccaatttcatctccccctgtaccactggaggaggcaccaaagaagtcatatgcatcaattgtaaaagtgatgaaagaatatcgaccaccaggatctgcagttccttccaggcctgcacccctgaaaacagagaagcaagcgtctcctgcccccgctcaggttgctgatgctctagctttcacctctaatcctcagagtggcagctttcaagatccagaagttgatgcacatgccatatatgtgcgaagtctgccattaaatgccacaccacaacaattagaggaagagttcaagagatttggcgccattaaacatgaaggcatccaagttagaagcaataagatccaagggttttgttatggctttgtagaatttgaggatgccagtgcagttcaaactgcaatagaggcttctcctgttactattggtgaacggcaatgttatgttgaagaaaaaagaactaccggttctcgtggtggtagcaggggaggaaggttttcaccgggtagaggtggcaactttcgaggtgaaggcattagaggccgtggtacatacaatggaggtagagggtatggaaggggtgagttcagttatcgatctgattatggaggccgaggtggtggcaggggtggctcatcacgtggtgatgtcagctaccagcgggttgaccactctggtacagccagtggtcgtggtgcccgggcaccatcggctgccactgctgttgcaaagtgagttcttggtagctatgagttggtaatagttgagttttatggccaccatcatggttgaccaaaagagtggtgggtttgggggattcgggttcatgtgaggattatcaagaaaagtcaggtcataaattgatgcttccttgttttgtggcaaggcaaagcagtggtgatatcggttgctaattgtagaatatacgtcttgagatgtcctagtatgtctggcttcggcgagcatctgatttgtggttttccctttgttactcattgccaaattatagaggttgatttgaggtgccaggaatttatag

SEQ ID NO: 5176 - DNA, 1542 bp, Zea mays; identical to SEQ ID NO: 1151

SEQ ID NO: 5177 - DNA, 1563 bp, Zea mays
gcaatcttccggaacatccatcgatctccccccagcggcgaggagagccggcggccacaggaaggagaaatggcttccgcacacaacgctctccgggtgtttttcatcctagccgtggtatgtgccgtatgcacagcgaaaaggacaggagccaagaaggaagaatcggcggcagcccctggtggtgctgctggaggcagcggcgggacgttcgacatctccaagctcggcgcgaccagcgacggcaagacggactgcacaaaggcagtccaggacgcgtggacgtcagcgtgcgaagcgaccggaagcgccacggtggtgatccccaagggcgactacctggtcggccctctcaacttcactgggccatgcaagggcagcagcatcgccatccagctggatggcaacctgctgggatcaaacgacctgaacaagtacacggcgagctggatcgaattgtctcacgttaacaacatcgggatcaccggctcgggcacgctggacggccaggggaccgccgtttatagcaagagcaagaccgacaacgtgaaggcgatgcccaacacactggtgctgtttcacgtgatcaacgccactgtcgccggaatcaaactactcaactccaagttcttccacatcaacatcgacaactcagagagcatcaccgtgaaggacgtgaacgtcaccgcgcccgccgacgttgagaacacggacggcgtccacgtcggaggctcctccaagatcagcatcctcaactcgaccatcggcaccggcgacgactgcgtctcgattgggcccgggtgcaacggcgtcttggtggacagcatcacctgcggccccgggcagggcatcagcgtcggctgcctaggccgctacaaggacgagaaggacgtgagcgacatcacggtgcggaacctgctcaagaacaccaccaacggcgtgcgcatcaagtcgtacgtggacgccgagtccgtgctgacggcctcccatctcaccttcgagaacatcaggatggaggaggtggccaaccccatcgtcatcgaccagtacttctgcccgcagaaggtatgccctggcaagcggagcaactcctcgcatgtctccgtcaaggacgtcacgttccgcaacatcaccggcacgtcgtccacgcccgaggccatcagcctgctctgctcggagacgcagccatgcagcggcgtctccctcatcgatgtcaacgtggagtacgccggcaagaacaacaaaaccatggccgtctgcagcaacgccaagggcaccgccaagggaagcatcgaggcactggcttgcctggtctgatgatgaccttccttttgcatgcatgcatggtatctcatccttgatgatgatctagctcactagttctttttaatttccgcttcattcgcttttccaaattcgattgtgtttcagccaagttgtttagcgggacatctcttgtctgatcttcctgctaaatagagttggactcctatatatagaggccttccggcacatataatatacgtcggaccaatattattgtgaccaaaaaaaaaaaaaaaa

SEQ ID NO: 5178 - DNA, 1670 bp, Sorghum bicolor
atccatctccccagcggcgaggagagccggccaccacagggagaaatggcttccgcaagcaatgctctcagggtgttcttcatcctagcgatcctatgcgcggtatgcacagcgaaaaggaccggagcaaagacgggagactcggcagcagactctgctgcttctggagccagcgggacgttcgacatctccaagctcggcgcgacgggcgacggcaagacggactccacaaaggcggttcaagacgcgtggacgtcagcgtgcagagcgaccggaagcgccacggtgctcatccccaagggcgactatctggtcggccctctcaacttcgttggcccgtgcaagggcgccatcaccatccagctcgatggcaacctgctgggatccaacgacctggccaagtacaaggcgagctggatcgagttgtcgcacgtcgacaacatcgtcatgactggctcgggcacgctcgacggccagggcaccgccgtttataaaaaggccaaaaccggcactgtgaaggcgatgcccaacacattggtgctgttctacgtgaccaacggcactgtctctggaatcaaactactcaactccaagttcttccacatcaatatcgacgcttcaaagaacatcacggtgaaggacgtgaacatcaccgcgcctggggacgttgagaacacggacggcgtccatgttggaatgtccaccaaggtgagcatcaccaactcaaccatcggcactggcgacgactgcatctctgttggccccgggagcgacggcgtcatggtgaacaacatcatctgcggccccgggcagggcatcagcatcggctgcctaggccgctacaaggatgagaaggacgtgaccgacgtgacggtgcgggactgcgtgctcaagaagaccactaacggcgtgcgcatcaagtcgtacgaggacgccgagtctgtgctgacggcgtcgcatctgaccttcgagaacatcaggatggaggaggtggcgaaccccatcatcatcgaccagtacttctgccccgagaaggtgtgccccggcaagaagagcgactcctctcatgtcatcgtcaaggacgtcacgttccgcaacatcacgggcacgtcgtccacgccacaggccatcagcctgctctgctcgcagtcacagccatgcagcggcgtgtcgctcatcgatgtaaacgtggagtacgccggcaagaacaacaagaccatggccgtgtgcagcaacgccaagggcaccgccaagggcagcgtcgaggccctggcatgcctggcctgagcgatgagcatgcatctgcatgcatgttatgtgtttcctcaaacgatgtgatcatcatctggtagttttctagttctcgcttttgcaaatttgattgcgtttaattcacaaatggtccggccaggcatcgaccttttctgatcttccctgcatgtgcagtaaatgtatatctgcaggcacttcaatggtgtggacgacgcatatatatatatctgggagttgtccgccttccctggtttagagtattgtaatattatagacaacagggcgttttgttgtatttttacgtccttcgatatagtagcgttattatatgtcctgacattatacatcactataatttacgatgatgaggtcctgtgagaagtcaggcgttgtattgg

SEQ ID NO: 5179 - DNA, 1717 bp, Zea mays
caaaggcgaggagagaactagcaaaggggaaatggctgcttccacaaacaacactctcagggtgctgttcaccctaatggttgtatgcgccgcagtatgcacagcgaaaaggactgtagcaaaggcaggagacttggcgccagcccctgctccgttaggagcaggaggcgccaccgcagccccagaaggtgcggctagagccagcaggacgttcgacatatcgaagttcggcgcgaccagcgacggcaagacggactcgacacaggcagtccaggacacgtggacgtcagcgtgcggagcgatgggagacgcaacgatgctcatccccaagggcgactacctggtgggccctctctacttcagtggcccgtgcatgggggacatcaccatccagctcgatggcatcctgctgggatccaacgacctggccaagtacacggcgagttggatccaggtgtcgcacgttaacaacatcgtcatcaacggctccggcacgctcgatggccagggcaccgcagtatataccaagagcaagaccgacgtcgtcaaggcgatgcccaacacactagtgttgttctacgtgaccaacggcactgtttccggaattaaactactcaactccaaattcttccacatcaacatcgacacttctaaggacatcaccgtgaaggatgtgaacatcacggcgcccgcggacgtcgagaacacggacggcgtccatgtcggcgggtcctccaatgtacgcatcaccaactcgaccattggcaccggcgacgactgcgtctccatcggccccgggagcgacggtgtcatggtgaacaacatcacctgtggccccgggcagggcatcagtgtgggctgcctaggccgctacaaggatgagaaggacgtgagcgacgtgacggtgcgggattgcgtgcttaggaacaccaccaacggcgtgcgcatcaagtcgtacgaggatgccgagtctgtgctcacggcgtcccatctcaccttcgagaacatcaggatggaggaggtggccaaccccatcatcatcgaccagtacttctgcccccagaaggtctgccccggcaagcgaagcaactcctcgcatgtctccatcaagaacgtcaccttccgcaacatctccggcacgtcgtccacgcccgaagccgtcagcctgctctgctccgagacgcagccgtgcagcggcgtctcgctcatcgatgtcaacgtcgagtacgccggcaagaacaacaagaccatggctgtgtgcagcaacgccaagggaaccgccaagggaagcctccaggccctggattgcctcgtctgatcgatgaccttgcatttgcatgcattcttcttccgtttcacttttccatattctattgcgttccagccaagcatcttgtttcttttatatatatatatatatatatatatatatatatatatatatatatatatatatatatatatatatatatatatatatatatatgcaggcaattatattaatggtggagacgacacatatatctgggcgtttgtctgccttcccagctggtttagagcactgtaatattattagatataacagggcgttatgttgtatttttacatcactataccttaccatgaggtcctttctcctctgtgaggggtcaggcattgtattggaaccttgtacggcgtttgcctttttaatgcaatgacatacactactcgcacc

SEQ ID NO: 5180 - DNA, 1488 bp, Zea mays
aggatatcttcgggaacatccatccatccccaatccccaaaggcgaggagagaactagcaaagggaaaatggctgcttccacaaacaacactctcagggtgctgttcaccctaatggttgtatgcgccgcagtatgcacagcgaaaaggaccgtagcaaagacaggagacttggcgccagcccctgctccattaggagcaggaggcgccaccgcagccccagaaggtgcggctagagccagcaggacgttcgacatatcgaagttcggcgcgaccagcgacggcaagacggactcgacacaggtggtccaggacacgtggacgtcagcgtgcggagcgatgggagacgcaacgatgctcatccccaagggcgactacctggtgggccctctctacttcagaggcccgtgcatgggggacatcaccatccagctcgatggcatcctgctgggatccaacgacctggccaagtacacggcgagttggatccaggtgtcgcacgttaacaacatcgtcatcaacggctccggcacgctcgatggtcagggcaccgcagtatataccaagagcaagactgacgtcgtcaaggcgatgcccaacacactagtgttgttctacgtgaccaacggcactatttccggaattaaactactcaactccaaattcttccacatcaacatcgacacttctaaggacatcaccgtgaaggacgtgaacatcaccgcgcccgcggacgtcgagaacacggacggcgtccatgtcggcgggtcctccaatgtacgcatcaccaactcaaccattggcaccggcgacgactgcgtctccatcggccctgggagcgacggtgtcatggtgaacaacatcacctgtggccccgggcagggcatcagtgtgggctgcctaggccgctacaaggatgagaaggacgtgagcgacgtgacggtgcgggattgcgtgcttaggaacaccaccaacggcgtgcgcatcaagtcgtacgaggatgccgagtctgtgctcacggcgtcccatctcaccttcgagaacatcaggatggaggaggtggccaaccccatcatcatcgaccagtacttctgcccccagaaggtctgccccggcaagcgaagcaactcctcgcatgtctccatcaaggacgtcaccttccgcaacatctccggcacgtcgtccacgcccgaagccgtcagcctgctctgctccgagacgcagccgtgcagcggcgtctcgctcatcgatgtcaacgtcgagtacgccggcaagaacaacaagaccatggctgtgtgcagcaacgccaagggaaccgccaagggaagcctccaggccctggattgcctcgtctgatcgatgaccttgcatttgcatgcattcttcttccgtttcacttttccatattctattgcgttccagctaagcatcttgtttcttgcagaatatatatatatatctctactacttactaaataaaaaaaaaaaa

SEQ ID NO: 5181 - DNA, 1768 bp, Sorghum bicolor; identical to SEQ ID NO: 1152

SEQ ID NO: 5182 - DNA, 1830 bp, Zea mays
cgactgtcctctctcaattcacgaggaaaaaaaagaataatctctccactttccttcaggatccagcccgcaccaccgcacgtctcctcctctctcaacaccggccaccgtaacaggaataatccagctcgtgattgaagaatccgatgacgacgccatgcctgggcgccgcggccttaagcgccagctggacggcgccctccctgacgggggcgtttctcgatctgacgctcgcctgggcctgcctctgcctcgccgcgctcgccgccgtcgccgcgcgcctcctcgcgctcctcggcctcccgctcccctgcacctgcgcgcgcccgcacctgccctgcctcctcgccttcctggcgcgctaccctccccgcgccgtcggatcccttcacgccgccctccgcgcccgcttccccttcgccggccccaccgacgacgaggcacgccttcagaaaggggtggaggaagagggggaggaggaggccatcgacgcgccgaaggaggaaggggattttcgtcgccgcgtggaggcgcgcgccgagctgcagatggagctcgagaaagagcgcagcgccgcagcgtcggcggccgaggaggccatgtccatgatcctgcgcctgcagaaggagaagtcggcgcttgagattgaggcgcgacagcagcgccgaaccgctgacgagcgctgcgccttctacgaggacgaggtcgaggagctccgggacatcgtgctcgtgcgggagcgtgaggtgcgcgcgctgcgcaaggaggttgacgcctaccgacgcctgctcggttttagcgctaccgaggaggacgaggaggaggatgacgagcaggagatggtcacgccgcatagtttccccatgtacgaaggagagcccagctcgtccaaatcggtcgatgcgaatcggatgcaacattttgggaatgattctgggttcagcttcaagacgccatcaccgcgtgaacaaccaacggtgccgcctcttactgcagggcaaatcaatgtgggaagcgatgattgtgttgctgttcagacgccggccaaagttcccgtggttcaatcaagactggagctagatagctctgaggatgaggacgaggatgaggatgatggagcagagacggtggaaatcctccccctatccgcccggagccaagatttggatcaaggtagccatttccatgctgatactgcacaaggtatggaatcgacttgtaccaaggaacagacagctcatgcatttcaggaaatcgagtgtccaggtatagacaagattgttaatgaccagataggaagcaagaatgatgccaatgtgtatgatgtgcatgtggtcgatgacatacgcttctcaacagaagtcaagggcctgattggccgaagcttctcagaggcaacaatgcaagcagagagattacagtctcgagctgttgcagatgatctccttgagaaaagcctgaatgccatcaaaggtgcacaggacaagataagaaatgcagctaatgaaaggaggcagtcattacagttgcaactcttagaggacatagctgatcaacttcaaggaatcaaggatgctgcagaagcagggaggcaagtgttctgtgctgctcctaaaagctccaagaggagctagggacttgtgttacgccactaatgcatggttggcgtcgtacataagttgtttcgggtttgtagaccaggtctgttgatttgttgattcaacaagtttgcttcttcttctttaaataagtagtggctattgctttgtacatgtatatatataaacaacatgggattcatcccagtctttataaaacgaatatatgtgt

SEQ ID NO: 5183 - DNA, 1161 bp, Sorghum bicolor
ctggagtaattaaaaggccactcccactcgcgccacactttcttccactgcccacatgcgcgcacagtgctaagctagcaaggcaagcccagccagctgagctccagtccagcaccgcagcaggtcgtcgtcggtctcgccgccatgagcaaggagaagcaccaccgcgactgggtcctccgccgctgctgcggctccatcgccgcctgcatcctcacgctcttcgccctcgtcggcttcatcgtgctcgtcatctacctcgccctccacccctccaagccttccttctacctccaggacgtgcagctccgctccatcgacctcagcgaccccgctctctccctcgacctccaggtgacgatcgcgtcgcggaacccgaacgaccgggtgggggtgtactacaagacgctggacgcgttcacgacgtaccgggacgagccggtgacggtgccggtgtcgatgccgtccatctaccagggccacaaggacgtgtcggtgtggtcgccggtgatgtcgggcgacgcggtgcccgtggcgcagtacgtggcggacgccatgaagcaggacatcgcggcggggtacgtgctgctccacgtcaaggtggaagggcgcgtcaagtggaaggtcggcagctgggtctccggcggctaccacctcttcgtcacctgccccgcgctgctcgccaccagcgggagcgccgtcgccggcggcgcgttcgccgccagcgccgcgtccggagtgcccgccggcgtcaacaccaccgtctcgctcaagttcacccacccggccgactgtactgtcgacgtgtgagttgcgacgacgacgacgggcgttcgttcgtactactagctagtacgatgatgaggatcaacctcgctctctcgatcgcgatcgcgattacgcctagtagctatcgatcgagcaattaatcttcttttgtagcaaatgatgttgttatatatattttccctttccgaacttgtgcagaataataagttaataagctgctagctctatctagctatacaacacatgtgtcgtacatttgctacatgtattaccatatttaattttttatgcgcgcacacaaaatctcacaatttagtttcaaaaaactagtactactatatatgtagagtaaatttccactcaagtagtcaa

SEQ ID NO: 5184 - DNA, 978 bp, Sorghum bicolor
atggccatggtgcagccggcggacacggccgtcaaggccaacgagatcctggcacggttccggcccatcgcgcccaagcccacactggcgaccgcggccgcggcggcgtcgcccgtggcgcaggccgcggccgagggcgtcgtggccgcgaaccgcgtgctgtgccatctgcagagcaggccgtgccgcgcgcggaaacgtggccgccccaccgtcgtgccggtgtcgccgcccaagtcgggctcgggcgcgcagtcgcccgccaagcggaagagagcggcgacgccgtacccgcctctccggtgcgcggcggccacggcctgctctgcgtccgcggtcgtcccggtcagtgcgcgcctccctctggcgtcgctcccgccggcgagtgcgggtgccgaggacctcgccaaggtggcggcggcggaggggagggacgtccccgtggagcgcgacctgctgcggaagctgctggagcccaaggtcatctcgccgcgggcggtgcgccccgtgtgctccgccatccacgtcgggtgcatccaccgcaccgacgcgacctgcaccgccgccgcctcgaagacggcggcacaggtggaggcggagctggaggtcgacgcgctcccggcggtggtctccgactccagcaaccgcgtccggctcgtgaacgacgcgtacaaggagatggtggggcagcccgagtgcccgtggctctacgccgtggcggccacgtcgaggaggatcagtggggaagtggcgctggtggtagccgaccagtcctccctgccggagacgtacggggtgttcacatgcacggcaaagatcgagtgggaggacgacgggaaggtcacctccatcgccgtaccctgcgacgtcagccggctgcactgcgagtccagagactacctcttcacctggaggttccgtaccgccgacgccgacgcatccgttggccacagctccgaggagattagtgagagttag

SEQ ID NO: 5185 - DNA, 1282 bp, Zea mays
cccaacgccgtgctccgtcgtcgtctccgcccccagagtgatcgagcccactgacctggcccccgagcctcagctcgtgagtccggcaccgcgcctcgccatggccatggtgcagccggcggacacggccgtcaaggccaacgagatcctggcgcggttccggcccatcgcgcccaagcccacactggcagcagccgccgccgccgccgcggcgcccgtggcgcaggccgcggccgagggcgtcgtggccgcgaaccgcgtgctgtgccatctgcagagcaggccgtgccgcgcgcgcaagcgcggccgccccaccgtcgtgccggtgtcgcccaagtcgggcgcgcagccgcccgcgaagcggaggagagcctctacgccgtacccgcctctccggtgcgcggcggcgaccacgggggcgcatgtgtccgcggtcgtcccaggcagtgcgcgtctcccaccggcgagtgcgggtgtcgaagacatcgcgaaggcggcggcggcggcggcgacagaggaggggagggacgtccccgtggagcgcgacctgctgcggaagctgctggagcccagggtcatatcgccgcgggcggtgcgcccggtgtggtctgccatccacgtcgggtgcatccaccgcaccgacgacgcggcctgcaccgacgccgccgtctcgaagacggcggttcaggtggaggcggagctggaggtcgacgcgctcccggcggtggtctccgactcaggcaaccgcgtccggctcgtgaacgacgcgtacaaggagatggtggggcagcccgagtgcccgtggctcgacgccgtggctgccacgtcgaggaggatcagcggggaggtggcgctggtggtagcggaccggtcctctctgccggactcgtacggggcgttcacatgcacggcaaagatcgagtgggaggacgacgggaaggtcacctccatcgctgcaccctgcgacgtcagccggctgcagtgcgagtccagggattacctcttcgcctggaggttccgcaccgccgccgccgacgccgacgcatccgttggacacagctccgaggagattagtgagagttagggaagcttgagctgcatccaatgaaaccaagtgcatagactaagccgctagctgcatgttaaaactgagcagcttcctctttcgcgaagtccaataggatgtagacccagttctgaaatcctgagtaaatataagatgttgactggagaatgcaaaggaagtataacctgccctttcaggaaaaaaaaaaaaaaaaaa

SEQ ID NO: 5186 - DNA, 1259 bp, Zea mays
ccccaacgccgtcgtcgtcgtgtctccgctccagagtgatcgagcacactgacctggcctgcccacccaagcctcagctcgtgagccagcgcgcctcgccatggccatggtgcaggcggcggacgcggccgtcaaggccaacgagatcctggcgcggtttcggcccatcgcgcccaatcccacactggcggccgagggcgtggtggccgcgaaccgcgtgctgtgccatctgcagagcaagccgtgccgcgcgcggaaacgcggccgccccggccccgccgtcgtggctccgtcgcccgagtcgggcttacagccgcccgccaagcggaagagagccacgacgccgtacccgcctctccggtgcagggggccgcgtgcgtccgcggccgtcccgggcagtgcaggcctccctctggcgtcggcgtcgctcccgccggcgggtgcgggtactgccgaggacctcgcgaaggtggcggcggaggggagggacgtccccgtggagcgcgacctgctgcggaagctgctggagcccaaggtcatctcgccgcgggcggtgcgccccgtgtgctccgccatccacgtcgggtgcatccaccgcgccgacgcgacctgcaccgccgccgtctcgaagacagcggttcgtgtggaggcggagctggaggtcgacgcgctcccggcggttgtctccgacgccagcaaccgcgtccggctcgtgaacgacgcgtacaaggagatggtggggcagcccgagtgcccgtggctcgacgccgtggctgccacgtcgaggaggatcagcggggaggtcgcgctggtggtagccaaccagtcctccctgccagagtcgtacggggtgttcacatgcacggcaaagatcgagtgggaggacgacgggaaggtcgcctccatcgatgtaccctgcgacgtcagccggctgcagtgcgagtccagagagtacctcttcgtctggaggttccgtaccgccgacgccgacgccgacgcatccgttggctgcagctccgaggagattagtgagagttaggggaagcttgcttgagctgcatcctgtgcgcgctgcagtgaaaccaggtgcataggctaagcaagctgcatctcaaaaactggccagcttcctctttcgcctagtccatagagtgtagacccagttctgaaatctggagtaaatataagatctcgactggagaatgcaaatggaaaattggaaatataacatgtactttttcacgaaaaaaaaaaaaaaa

SEQ ID NO: 5187 - DNA, 1651 bp, Sorghum bicolor
gacgacgcaccagcagcgaggagctgagctgagctgagcagcggcaacggcagcgccgcaccacacgcgcgcgcgcgcgcatctcctacctagctcacgatggcgcctgcccgccgctgctccttgctcgcgctcgccctctcgctgtcgctctgctccgtcttcgctgccgcggcgcagcaggcggccgaccgcgtggcggggctgccggggcagccgcccgtggggttcgcgcagtacgccgggtacgtgaccgtgaacgagacgcacggccgcgcgctcttctactggttcttcgaggccacctcgtcgcccgacaagaagccgctggtgctctggctcaacggcgggcctgggtgctcgtcgattgggtacggggaagcggaggagctggggcccttcttggtgcagaagggcaagccggagctcagatggaacaactactcctggaacacagaggcgaaccttatgttcctcgagtccccagtgggcgtcggcttctcctacacaaacacaagctccgacctgcagcaacttggtgacaagatcaccgctgacgacgcttacaaattcctgctcaactggttcaagaggttcccgcagtacaagtcccacgacttctacatcgccggcgagagctacgccgggcactacgtcccgcagctgtcggagaagatcttcgacggcaacagggcggggcccaaggagagctacatcaacttcaaaggcctgatggtcgggaacgcgctcatggacgacgagacggaccagacgggcatgatcgactacgcctgggaccacgccgtcatctccgaccgggtgtacggcgacgtcaaggccaagtgcgacttcgccatggtcaacgtcaccgacgcctgcgacgccgcgctccaggagtacttcgccgtctaccgcctcatcgacatgtacagcctctacacccccgtctgcaccgacccgggctcgtcggcgtcggcatcggcgtcccaccggaaggtcgccgtccatggcgccgcccccaggatcttctccaaataccgaggatggatcatgaagccggcgggctacgacccctgcacggcggagtacgcggaggtctacttcaaccggccggacgtccaggcggcgctgcacgccaacgtgaccaagatcggctacaactggacacactgcagcgacgtgatcggcacttggaacgacgccgccttctccaccctcccaatcatccgcaagctcgtcgccggcgggctcagggtgtgggtcttcagcggcgacaccgacgggaggatccccgtgacggcgacgaggctcaccctcaacaagctcgggctcaagaccgtccaggagtggacgccgtggtacgaccgtctgcaggttggcggatggacgatcgtgtacgagggcctgaccttcgtcacgatccgcggcgccgggcacgaggtccctctgcacgcgccacggcaggcgctgacgctcttcagcaacttcctggccggaaccaagatgcccccaacggcgttcctgtagctgccgccgcccattgtccggcaaagctggctgatctggggttttccttttcgccttctaccaaagatgtaattgtaattcgattgggggaaaaaaggttcaggaataaaagtcatagtgctga

SEQ ID NO: 5188 - DNA, 1683 bp, Zea mays
gcagcagcgaggagctagagcagcggcagagcgcgcggcgcacaccacgcatcgtcctagctcacgatggcgggcgcctggtccttgctcgcgctctccctatcgctctgctccgtcgcggccgtcgcggtgcagcaggtgaacacggtggccgcggcgcagcaggcggcggaccgggtggcggggctcccggggcagccgcccgtggggttcgcgcagtacgccgggtacgtgaccgtgaacgagacgcacggccgcgcgctcttctactggttcttcgaggccaccgcgtcgcccgacaagaagccgctcgtgctctggctcaacggcgggcccgggtgctcgtcgattgggtacggggaggcggaggagctgggtcccttcctggtgcagaagggcaagccggagctcagatggaacaactactcctggaacacagaggccaaccttatgttcctggagtccccggtgggcgtcggcttctcctacacaaacacgagctccgacctgctgcaactcggcgacaagatcaccgctgacgacgcttacaagttcctgctcaactggttcaagaggttcccgcagtacaggtcccacgacttctacatcgccggcgagagctacgccgggcactacgtcccgcagctgtcggagaagatcttcgacggcaacagggcggggcccaaggagagctacgtcaacctcaagggcctgatggtcgggaacgcgctcatggacgacgagacggaccagacgggcatggtcgactacgcctgggaccacgccgtcatctccgaccgggtgtacgccgacgtcaaggccaggtgcgacttcagcatggccaacgtcaccgacgcctgcaacgccgcgctccaggagtacttcgctgtgtaccgcctcatcgacatgtacagcctctacaccccggtctgcaccgacgacccggccggctcgtcggcgtcgtcctcctacgacgcgcgcggccaccggaaggtcgccgtccacggcgccgcccccaggatcttctccaaataccgaggatggatcatgaagccggcgggctacgacccctgcacggcgcagtacgcggagacctacttcaaccggcccgacgtccaggcggcgctgcacgcgaacgtgaccaagatcggctacaactggacgcactgcagcgatgtgatcaacacttggaacgacgccgccttctccaccctccccaccatccgcaagctcgtcgccggcggcctcagggtgtgggtcttcagcggcgacaccgacgggaggatccccgtgacgtccacgaggctcaccctcaacaagctagggctcaagaccgtccaggagtggacgccgtggtacgaccatctgcaggttggtggatggacgatcgtctacgagggcctgacgttcgtcaccatccgcggagccgggcacgaggtgcctctgcacgcgccgcggcaggcgctgacgctcttcagcaacttcctggcaggcaccaagatgcccccaatggcgttcccctagtttcaaaagaattaaaaaaaaagtgcgtcctcttgcccggcaaagccggctgatatgtttatttcctcccttctcgcttctaccaaagttgcaagtgtaattcgattggaaaaaagttcagaaataaaagtcatagtgctgacctcaatgctcagtcac

SEQ ID NO: 5189 - DNA, 1758 bp, Zea mays
aaccacgcaccagcagcagcgaggagctagagcagcggcagagcgcgcggcgcacaccacgcatcgtacgtcctagctcacgatggcgggcgcctggtccttgctcgcgctcgccctatcgctctgctccgtcgcggccgtcgcggtgcagcaggtgaacacggtggccgcggcgcagcaggcggcggaccgggtggcggggctcccggggcagccgcccgtggggttcgcgcagtacgccggctacgtgaccgtgaacgagacgcacggccgcgcgctcttctactggttcttcgaggccaccgcgtcgcccgacaagaagccgctcgtgctctggctcaacggcgggcccgggtgctcgtcgattgggtacggggaggcggaggagctgggtcccttcctggtgcagaagggcaagccggagctcagatggaacaactactcctggaacacagaggccaaccttatgttcctggagtccccggtgggcgtcggcttctcctacacaaacacgagctccgacctgctgcaactcggcgacaagatcaccgctgacgacgcttacaagttcctgctcaactggttcaagaggttcccgcagtacaggtcccacgacttctacatcgccggcgagagctacgccgggcactacgtcccgcagctgtcggagaagatcttcgacggcaacagggcggggcccaaggagagctacgtcaacctcaagggcctgatggtcgggaacgcgctcatggacgacgagacggaccagacgggcatggtcgactacgcctgggaccacgccgtcatctccgaccgggtgtacgccgacgtcaaggccaggtgcgacttcagcatggccaacgtcaccgacgcctgcaacgccgcgctccaggagtacttcgccgtgtaccgcctcatcgacatgtacagcctctacaccccggtctgcaccgacgacccggccggcgcgtcggcgttgccgtcctcctacgacgcgcgcggccaccggaaggtcgccgtccacggcgccgcccccaggatcttctccaaataccgaggatggatcatgaagccggcgggctacgacccctgcacggcggagtacgcggagacctacttcaaccggcccgacgtccaggcggcgctgcacgcgaacgtgaccaagatcggctacaactggacgcactgcagcgatgtgatcaacacttggaacgacgccgccttctccaccctccccaccatccgcaagctcgtcgccagcggcctcagggtgtgggtcttcagcggcgacaccgacgggaggatccccgtgacgtccacgaggctcaccctcaacaagctagggctcaagaccatccaggagtggacgccgtggtacgaccatctgcaggttggtggatggacggtcgtctatgagggcctgacgttcgtcaccatccgcggagccggacacgaggtgcctctgcacgcgccacggcaggcgctgacgctcttcagcaacttcctggcaggcaccaagatgcctccaacggcgttcccctagtttcaaaagaatttaaaaaaggtgcctcctcttgcccggcaaagccggctgatatgtttctttccccccttctcgcttctactaaagttgtaagtgtaattcgattggaaaaaagttcagaataaaagtcatagtgctgacctcaatgctcaaaaaaaaaaaaaaaaaaaaaaaaaaaaaaaaaaaaaaaaaaaaaaataaaaaaaaaaaaaaaa

SEQ ID NO: 5190 - DNA, 1717 bp, Oryza sativa Japonica Group
gcagctagcgcgcggtacggtaggcaccagctatacagcgcgccacacacaacaatggccggcgctaccgctgccgccgtctcctcctccttcctcgcgctcgcgttgctctcgctctgcgccgcggccgctggcggctcgcctcagctggacgcggaggccgcgcggcagcaggaggccgaccgcgtgacgaggctgccggggcaacccgccgtgcggttcgcgcagtacgccgggtacgtgacggtgaacgagacgcacggccgcgcgctcttctactggttcttcgaggccaccgccgccgccgacaagaagcccctcgtcctctggctcaacggcgggcctgggtgttcgtctgttgggtatggagaagcggaggagctcggtccattcttggtgcagaagggcaagccggagctaaaatggaacaagtactcgtggaacaaagaggccaatctgatgttcctggagtcccctgtgggtgtcggcttctcatacactaacacaagctccgatctgcagcagcttggcgacaagatcaccgctgatgatgcttacatcttcctgctcaactggttcaagcgcttccctcagtacaaatctcacgacttctacatcgctggagagagctacgctgggcattacgttccacagctttcggagaagattttcgacggcaacaagcaaggccccaaggagaactacatcaacttcaagggtttcatgatagggaatgccctgatggacgacgagacggaccagacgggcatgatcgactacgcctgggaccacgccgtcatctcggaccgggtgtacgccgacgtcaagaagtactgcaacttcagcatggagaacgtgaccgacgcgtgcgacagcgcgctcaccgagtacttcgccgtgtaccgcctcatcgacatgtacagcctctacacccccgtctgcaccgaggtctcgtcgtcggcggcgttcggccagcgccaggtcgccgtccacggcgccgccccaaaaatcttctccaaataccatgggtggtacatgaggccggcggggtacgatccgtgcacgtcggatcacgccgaggtgtacttcaaccgggctgacgtgcaggaggcgctgcacgccaacgtgaccaatatcggctacaactggacgcactgcagcgacgtgatcggcaagtggagagatgctcccttctcgactctccccatcatccgtaagctcgtcgccggcggcatcagggtctgggttttcagcggtgacaccgatggaaggatccccgtgacgtcgacgaggctcaccctgaacaagcttgggctgaagacggtgcaggagtggacgccgtggtacgaccatcagcaggttggaggatggacgatcctctacgagggcctgacgttcgtgacgatccgcggcgccgggcacgaggttcccctgcacgcgccgaggcaggcgctcagcctcttcagccacttcttggctgacaagaagatgcctccgacggcgttcccctagtcgctcgcatgcagtctgccttcttcaacgatggcgaggaacgggcgtcgtgcgcccactaggttgttttccagcgataccaactgatcaggaaattttcttttctttggtccaagactccaagtcatgtaacacagtggaaattcgattggaacaatcgataacaataaaatcatatatagtgttgattgatttcgatgctcgc

SEQ ID NO: 5191 - DNA, 4120 bp, Musa acuminata
gttcgcggtggcaggtcgagggaattggaccgcgaggccttgcgacaacaggaggccgaccgcgtggtcgggctccccggtcagccgccggtgagcttccgccagtacgccgggtacgtgacggtcaacgagagccacggccgcgcgctcttctactggttctttgaggccactcacgatgtggagaagaagccgcttcttctctggctaaacggaggtcatatcttcttcttctttcgttcttcttcttcttcttactgttacggtaatcgatagcgtatgatacaatgtttcgtcacagaaaactgggcagaatgtaacaacatctttagcttcgtaaactacacactgctgacctttaggaacgatgattattttgtccattaatccaagcaggaaaagaagcttcccttttgtaaagtctagaagagcaaaatgatggcggataggccaaaggttggttccaccacaatcagactccaaaacacagtcccaattgaattccctcaccaaactacgaaaccttaattggtcagccaattatgtgtaaagtctatattatatgacttgaaatgatgtcttgtttactgattcttttgggaataaaagaaagaaagaacactgttgatttcttccttgggttgttctatcgggaccttccattattgcagcacagcatgacccagctttggagagagctacctggtgttcatggcacatcatgggcttccctcccccccccccccacccccacccccactaggaggagtcgttcgttgaccaccttctctccaaacaagcaacaagatgagaaacttgacccacaccttgtgtaaacctccctcacaggcaacagtgtccgccattgccggttccaccttcccaagcacacaccctttgggtattcggaaggttctgcctgcaatgtagtttgtaccagtaaccttagatcggaggaacagggaccgaagggcctgatgtggcattactattaagggagagggtgggtggtcggatgtggcactactattaagggagagggtgggtggtcggggaccagccagaggctggaatcctccatgggcaacccaagcaacaggattgagccgctgtaagtgggtaagaggtggtaccagttgcgaggtcgacagggatggcgccttttgcccacaaaaagcgtagatgctgcaggtctcactatgtcgactccagctccggtgagccctcctccgttccggaagcagcaaggaatctggggaccaggtaggacttgcgtgtggccacctttcttgcctgcgtccataggagaagataatgtagcataaatatcactcgcccaatttgtcccaaggtagaaagaaaatattagaatttgcagggggaaactccacagtagtccctcgctgtggatgcctcgatgattgatgtgtactgggaatagtggatgcatgatgcattgtccagccaatccgtcagcatcttgtacttgtggagacaaattggattgcaagttctcttggcatgcttcatggtggtgtctgacatggttcattgcagggcctgggtgttcttccattgggtatggggctgcagaggagcttggaccttttctgatgcaaaagggtgtgccagagctcaggttcaatcagcattcttggaacaaaggcaagaaacctatccctagtgcttcctttccagacacaaaatattgctagtggttaacttgaatgctactgctgcattgtaataacatgtaatgcagacaatgatcaaatgcataacacatcaacagctaaatttcagagtcacagaaaacagaaagatcataactcttcgagtacaaagcaatttgtgatggacacttaaaagtatgctgattcttgtcacatttcagaggcaaatctgctatttcttgagtcacctgttggagtgggattttcttacactaataccagctctgatttgcagtcactgggagacaagatcactggtaagtcctacagagagttctttcacttgaccatatacatgttccatagaaatccttggggcatttgttcacatctactgatattgttctactgatcatccaaagctgaggactcctacatattccttgtaaactggctcaagaggttcccacagtacaagtcccatgacttctacattgctggagaaagttatgcaggtaaaagagttgctgtaccatgcaaacatcactgggtcagttggtgaaatgtaattaacactacttgctaccttaggacactatgttccacaactatccgagaagatatttgacgaaaacaaaaaagcttcaaaggaaacctacataaacttcaaaggatttatggtaaaagttctacatcaaacacctgtagatagcattttcctacctgaaactgctagcgtagattcatctcaaaggtgctaaagatcataccaacataatcttacgcatgaatcagataggaaatgcattgatggacgacgacactgatcagacggggatgatcgactatgcatgggaccatgccgtcatctccgaccgtgtctaccacgacgtcaagagcaactgcaatttcggcattgaacctgctactgaggcctgtaacaatgcactgagagagtactttgcagtctatcgtataatcgacatgtacagcttgtatgctcctgtctgtaccagcatcacctctacccggaagtccttccagatcgagggtgcagctcccaagctgttctccagatatgtaagttgctttcctaccaacaatggtgacgaccatcctgacattcaatacccattgcaggatgtgaatattcattctgaagagctgcatctaagcaaccaagactagacaacataatatctgtatctacataaatgcttgagtaaggatttctcttctcacagagtgggtggcatcaaaagccagcggggtacgacccttgtgtctcggactattccgaggtgtatttcaaccgaccggatgtccaagaagctctgcatgccaacaccacaaagattggctacaactggacccactgcaggtacatatatttggtgaattatgatgattccttgagatcttcagcattttgctggtagagacatggagaatacacttttaactagaaaatccaatacttgcttccaggaagctgaagtaggaacaagtaattattaatcaatttgtcaaatacatgaactcagtttctacaagattagtcatctattctaaaaaatatattcctgccttctttggacagtgaggtagtcaccaaatggaatgattcgccagccactatgctcccagtcatccgcaagcttatcaatggcggcctcagagtatgggttttcaggtaaggatacaagtaaggaacccctaattgagataattaccaaaatatctgcattagtagaatctgcaaattgcatggagaaatttgagcttacaattaatcattcatcatattgtaaaacaatgcgatcgagtgagtatcgattagctaactaatgctagaaagtacttcagacaaataaccaaatgtgctagatcatcttggttctggaatggagatcaacaaaaacttaaaataatgtcgtcttacacaatgtctctcagttcttcatgttagttaatactatcaacaaaaatatgcaatttgcatataacagataggacctgagcaatatataactagcaaaaaacaaaaaaaaaaaacaaaagacacaaaaaaggcctttagttctcaactttcttctttccctttcagtggggacactgatggaagaattccagtcacctcaacaaggtatacactaaacaagcttggcatgaaaactatccaagaatggaagccatggtatgatcgtaagcaggtatgagttggatccctggaacccattagtaattttcatcctaaaggataacttgagagtcaccagacattcttgttaactacgtaggtgggtggatggacaattgtctttgaaggactgacatttgttacagttcgtggtgccggacaccaagttccaacatttgctcctaggcaggctcagcagttgattcatcacttcttggctaaccagcaattgcctccatcagcattc

SEQ ID NO: 5192 - DNA, 2373 bp, Sorghum bicolor
atgcggcgccgccccttcctctccatcctcctcctcctcctcctcgccgcgtcggcgacgacaccaacgccggcagcatcatcatcagcgcgggcggcgttcgcgtgcgcgccgggcggaccggcgacgacgctgccgttctgccggcagtcgctgccgctgcacgcccgcgcgcgggacttggtgtcgcggctgacccgcgccgagaaggtgcggctgctggtgaacaacgcggcgggcgtggcgcggcttggcgtgggcgggtacgagtggtggtccgaggcgctgcacggcgtgtcggacacgggtcccggggtgaagttcggcggcgcgttcccgggcgccaccgcgttcccgcaggtcatcggcgccgccgccgcgctcaacgccacgctctgggagctcatcggacgggcggtgtcggacgaggcgcgcgccatgtacaacggcggtcgagcaggactgaccttctggtccccgaacgtgaacatcttccgtgacccacggtggggccgcgggcaagagacccccggcgaggacccggccatctcgtcgcggtacgccgccgcgtacgtgcgcggcctccagcaaccctacgaccacaaccggctgaagctcgccgcctgctgcaagcacttcacggcgtacgacctggacagctggggcggcacggaccggttccacttcaacgccgtcgtgtccccgcaggatctcgaggacaccttcaacgtccccttccgcgcctgcgtcgccggcggccgcgccgccagcgtcatgtgctcgtataaccaggtcaacggcgtccctacctgcgccgaccaagggttcctccggggaaccatccggaaggcgtggggcctggacggctacatcgtctccgactgcgactccgtcgacgtcttcttccgcgaccagcactacacccgcaccgccgaggacgccgtcgccgccacgcttcgcgccgggctggacctcgactgcgggcctttcctcgcgctctacaccgagaacgccgtcgcgaggaagaaggtctccgacgccgacgtcgacgccgcgctgctcaacaccgtcaccgtccagatgcggctcggcatgttcgacggcgacccggcgtcgggcccgttcggtcacctcggcgccgccgacgtgtgcaccaaggcgcaccaggacctggccctcgacgccgcgcgacagagcgtcgtgctcctcaagaaccagcgcgggaggaagcaccgggaccgggacgtcctcccgctccgccccgccgcgcaccgcgtggtggccgtcgtcggcccgcacgccgacgccaccgtcgccatgatcgggaactacgccgggaagccctgcaggtacaccacgccgctgcagggcgtggcggcgtacgcggcgcgggtcgtgcaccaggccgggtgcgccgacgtcgcgtgccaggggaagaaccagcccatcgccgcggcggtggacgcggcgcgccggctgacgccaccgtcgtcgtcgccgggcttgaccagaagccttctcctccctgggcgacaggccgagctcatctccgccgtcgctaaggcggccaagggccccgtcatcctcgtcctcatgtccggcggacccatcgacatcgcgttcgcgcagaacgaccccaggatcgacggcatcctctgggtgggataccctggccaggccggcggccaggccatcgccgacgtcatctttggacaacataacccaggcgggaagctgccggtgacatggtaccctcaagactacctggagaaggtgccgatgacgaacatggcgatgcgggcgaacccggcgcgcgggtacccggggcggacgtaccggttctacacggggccgacgatccacgcgttcgggcacgggctgagctacacgcagttcacgcacacgctggcgcacgcgccggcgcagctcaccgtgcggctgtccacctcgtcggcgtccgcgtccgcgtccgcgtccgccgcctccctcctgaacgcgacacggccgtcgcgcgccgtgcgggtggcgcacgcgcggtgcgaggggctgacggtgcccgtgcacgtggacgtcaggaacgtcggcgaccgcgacggcgcgcacgccgtgctcgtgtaccacgtggcgccctcgtcgtcgtcgtcgtccgcccctgccggcacggacgcgccggcgcggcagctggtggcgttcgagaaggtgcacgtgcccgccggcggcgtggcgcgcgtggagatgggcatcgacgtgtgcgaccggctcagcgtcgcggaccgggacggcgtgcggcggatccccgtcggcgagcacaggctgatgatcggcgagctcacgcactcggtcacgctcggcgtcgagcagctcggggcatag

SEQ ID NO: 5193 - DNA, 2629 bp, Zea mays
cacccggcagccggcagccatgcgaagccgccccctcctcctgctcctcctcctcgtcgcggcgacggcggcgcccacggcgtcgccgtcctcggcgttcgcgtgcgcgccgggcggccccgcggcgtcgctgccgttctgccggcagtcgctgccgctgcgggcgcgggcgcgggacctcgtgtccaggctgacccgcgccgagaaggtgcggctgctggtgaacaacgcggccggggtgccgcggctcggggtggccggctacgagtggtggtccgaggcgctgcacggcgtgtcggacacggggcccggggtgcggttcggcggcgccttcccgggcgccaccgcgttcccgcaggtcatcggcaccgccgcgtcgctcaacgccacgctctgggagctcgtcggacgggcggtgtccgacgaggcgcgcgccatgtacaacggcgggcgggcgggcctcaccttctggtccccgaacgtgaacatcttccgggacccgcggtggggccgcggccaggagacgcccggcgaggaccccgccgtctcggcgcgctacgccgccgcctacgtgcgcggcctccagcagccctacgccgccccgaacggcggccaccgcaaccgcctcaagctcgccgcctgctgcaagcacttcacggcgtacgacctggacaagtggggcggcacggaccggttccacttcaacgccgtggtggcggcgcaggacctggaggacaccttcaacgtccccttccgcgcctgcgtcgaggacggccgcgccgccagcgtcatgtgctcctacaaccaggtcaacggcgtgcccacgtgcgccgacgcggcgttcctgcgcggcaccatccgcgggcgctggggcctggacggctacatcgtctccgactgcgactccgtcgacgtcttcttccgcgaccagcactacacgcgcacccccgaggacgccgccgccgccacgctccgcgccggcctcgacctcgactgcgggccgttcctcgcgctctacgccggctccgccgtcgccgcgggcaaggtcgccgacgccgacgtcgacgccgcgctcctcaacaccgtcaccgtgcagatgcggctcggcatgttcgacggggaccccgcggccgggccgttcgggcgcctgggccccgcggacgtgtgcaccagggagcaccaggacctggcgctcgacgcggcgcgccagggcgtcgtgctcctcaagaaccggcgcggcgccaggcacaacagggacgtgctcccgctccgccccgccgcgcaccgcgtcgtcgccgtcgtcggcccgcacgccgacgccaccgtcgccatgatcgggaactacgcgggcaagccctgccgctacaccacgccgctgcagggcgtcgccgcgtacgccgcgcgggttgcgcaccaggccggctgcaccgacgtcgcgtgccgcgggaaccagcccatcgccgcggccgtcgaggcggcgcgccaagccgacgccaccgtcgtcgtcgcgggcctcgaccagagggtggaggccgagggcctggaccggaccacccttctcctccctgggcgacaggccgagctcatctccgccgtggccaaggcgtccaaggggccagtcatcctcgtgctcatgtctggcggtcccatcgacatcgcgttcgcgcagaacgaccccaggatcgatgggatcctgtgggtcggctaccccggccaggccggaggacaggcgattgccgacgtcatcttcggacaccataatccaggtgcgaagctgccggtgacatggtaccatcaagactacctgcagaaggtgccgatgacaaacatggcgatgcgcgcgaacccggcgcgcgggtaccccggccggacgtaccggttctacacgggcccgacgatctacccgttcgggcacgggctcagctacacccagttcacgcacacgctcgcgcacgcgccgacgcagctcaccgtgcgcctctccggcagcggccactccgccgcgtccgccgcctccctcctcaacgcgacgcttgcgcgccccgtccgcgccgtgcgggtggcgcacgcgcggtgcgagggcctcacggtcccggtgcacgtggacgtgagcaatgtcggcgaccgcgacggcgcgcacgccgtgctcgtgtaccacgcggcgccctcgccctcgcacgctgcccccggcgcggacgcgcccgcgcggcagctggtggcgttcgagaaggtgcacgtgcccgcgggcggcgtggcgcgcgtggagatgcgcatcggcgtgtgcgaccggctcagcgtcgcggaccggaacggcgtgcggcgggtccccgtcggcgagcacaggctgatgatcggcgagctcacgcactcggtctcgctcggcgtcgagcagctcggggtataaccggatgcttgaacggaaggtggaggatccagagtaataattgtgatgtgatgtgttgtttcgggtggggggtattattggcttctgattgccggggtgcttgctgctgtctctgcaaaggtggagatgggagatgtagaaggcaccggattactgaaaattgctggattgaaaacgaaaacgattgaaatggaaggaagacagaagaatgttgtttccctcctc

SEQ ID NO: 5194 - DNA, 2469 bp, Oryza sativa Japonica Group
atgcggcgcctcctgctcctcccgctcctggtgctcgccggggcggcggtcggcgggggcgtcgtccccgtcgcggcgcggtcggcgttcgcgtgcgcggcgggcgggccggcggcgacgctgccgttctgcaggcggtcgctgccggcgcgggcgcgggcgcgcgacctggtggcgcggctgacgcgcgccgagaaggtgcggctgctggtgaacaacgccgccggcgtgccgcggctgggcgtcgccgggtacgagtggtggtcggaggcgctccacggcgtgtccgacacggggcccggggtgaggttcggcggcgcgttccccggcgccaccgcgttcccgcaggtcatcggcaccgccgcgtcgttcaacgccaccctctgggagctcatcgggcaggtgatgcccattctgaaaggtggccatgcaagatgcaaccaacggccaagctgtatacgtatatctgtattcatgtacgtgtacgtatgcgcacaggcggtgtccgacgagggtcgcgcgatgtacaacggcggtcaggcggggctgacgttctggagccccaacgtgaacatcttccgcgacccgcggtggggccgcggccaggagacccccggcgaggaccccgccgtcgccgcccgctacgccgccgcctacgtccgcggcctccagcagcagcaaccctcctccggccgcctcaagctcgccgcctgctgcaagcacttcaccgcctacgacctcgacaactggtccggcaccgaccgcttccacttcaacgccgtcgtgacgcgccaggacctcgaggacaccttcaatgtccccttccgctcctgcgtcgtcgacggccgcgccgccagcgtcatgtgctcctacaaccaggtcaacggcgtgcccacctgcgccgacgcggcgttcctccggggaaccatccgccgccggtgggggctcgcaggctacatcgtctccgactgcgattcggttgatgtgttctacagcgaccagcactacacgcggaccagggaggacgccgtcgcggcgacgctccgggcggggctcgacctcgactgcggcccgttcttggcgcagtacaccgagggcgccgtcgcgcaggggaaggtcggcgatggcgacattgatgccgcggtgacgaacaccgtcacggtgcagatgcggctcgggatgttcgacggcgacccggcggcgcagccgttcgggcacctgggcccgcagcacgtgtgcacggcggcgcaccaggagctcgcggtggaggcggcgcggcaggggatcgtcctcctcaagaacgacgggcgggcgctgccgctgtcgccggcgacggcgcgccgcgccgtcgccgtcgtgggcccgcacgccgaggcaacggtggcgatgatcgggaactacgccgggaagccgtgcaggtacacaacgccgctgcagggcgtcgcccggtacgccgcgcgggccgcgcaccagccgggatgcaccgacgtggcgtgcgcgggaagcggccagccgatcgcggcggccgtcgacgccgctcgccgcgccgacgcgaccatcgtcgtcgccggcctcgaccagaagatcgaggccgaggggctggaccgcgcgagcctcctcctccctggccggcaagcggagctcatctcgtcggtggcgaaggcgtcgaaagggccggtgatcctggtgctcatgtccggtggccccatcgacattgggttcgcgcagaacgacccgaagatcgccggaatcctgtgggctgggtaccccggccaggccggcgggcaggccattgctgacgtcatcttcggccaccacaacccaggagggaagctgccggtgacatggtacccgcaagattacctgcagaaggtgccgatgacgaacatggcgatgcgcgccaatccggccaagggctaccccggccggacctaccgcttctacaccggcccgaccatccaccccttcggccatggcctcagctacacctccttcacccactccatcgcccacgcgccgtcgcagctcaccgtccgcctctccgcccaccacgccgccgcctccgcctccgcctcgctcaacgccacggctcgcctcagccgcgccgccgccgtgcgcgtcgcgcacgcgcggtgcgaggagctgaggatgccggtgcacgtcgacgtcaggaacgtgggagaacgcgacggcgcgcacacggtgctcgtgtacgccgcggcgccggcgtcgtccgcggcggaggcggcggcgggccacggcgcgccggtgcggcagctggtggcgttcgagaaggtgcacgtgggcgccggcgggacggcgagggtggagatgggcatcgacgtgtgcgacgggctcagcgtcgccgaccggaacggggtccgaaggatccccgtcggcgagcaccgcctcatcatcggcgagctcacgcacaccgtcaccatcgccctcgagcagctaggggtatag

SEQ ID NO: 5195 - DNA, 2357 bp, Zea mays
aaccacacactctccgtctccgactacgaccatggtccatccatggcgatcaactcaaggctgacaaatccattcatccattattatattattatatactgatgatgactcgtgcaactgcaggcggtgtccgacgaggcgcgcgccatgtacaacggcgggcgggcgggcctcaccttctggtccccgaacgtgaacatcttccgggacccgcggtggggccgcggccaggagacgcccggcgaggaccccgccgtctcggcgcgctacgccgccgcctacgtgcgcggcctccagcagccctacgccgccccgaacggcggccaccgcaaccgcctcaagctcgccgcctgctgcaagcacttcacggcgtacgacctggacaagtggggcggcacggaccggttccacttcaacgccgtggtggcggcgcaggacctggaggacaccttcaacgtccccttccgcgcctgcgtcgaggacggccgcgccgccagcgtcatgtgctcctacaaccaggtcaacggcgtgcccacgtgcgccgacgcggcgttcctgcgcggcaccatccgcgggcgctggggcctggacggctacatcgtctccgactgcgactccgtcgacgtcttcttccgcgaccagcactacacgcgcacccccgaggacgccgccgccgccacgctccgcgccggcctcgacctcgactgcgggccgttcctcgcgctctacgccggctccgccgtcgccgcgggcaaggtcgccgacgccgacgtcgacgccgcgctcctcaacaccgtcaccgtgcagatgcggctcggcatgttcgacggggaccccgcggccgggccgttcgggcgcctgggccccgcggacgtgtgcaccagggagcaccaggacctggcgctcgacgcggcgcgccagggcgtcgtgctcctcaagaaccggcgcggcgccaggcacaacagggacgtgctcccgctccgccccgccgcgcaccgcgtcgtcgccgtcgtcggcccgcacgccgacgccaccgtcgccatgatcgggaactacgcgggcaagccctgccgctacaccacgccgctgcagggcgtcgccgcgtacgccgcgcgggttgcgcaccaggccggctgcaccgacgtcgcgtgccgcgggaaccagcccatcgccgcggccgtcgaggcggcgcgccaagccgacgccaccgtcgtcgtcgcgggcctcgaccagagggtggaggccgagggcctggaccggaccacccttctcctccctgggcgacaggccgagctcatctccgccgtggccaaggcgtccaaggggccagtcatcctcgtgctcatgtctggcggtcccatcgacatcgcgttcgcgcagaacgaccccaggatcgatgggatcctgtgggtcggctaccccggccaggccggaggacaggcgattgccgacgtcatcttcggacaccataatccaggtgcgaagctgccggtgacatggtaccatcaagactacctgcagaaggtgccgatgacaaacatggcgatgcgcgcgaacccggcgcgcgggtaccccggccggacgtaccggttctacacgggcccgacgatctacccgttcgggcacgggctcagctacacccagttcacgcacacgctcgcgcacgcgccgacgcagctcaccgtgcgcctctccggcagcggccactccgccgcgtccgccgcctccctcctcaacgcgacgcttgcgcgccccgtccgcgccgtgcgggtggcgcacgcgcggtgcgagggcctcacggtcccggtgcacgtggacgtgagcaatgtcggcgaccgcgacggcgcgcacgccgtgctcgtgtaccacgcggcgccctcgccctcgcacgctgcccccggcgcggacgcgcccgcgcggcagctggtggcgttcgagaaggtgcacgtgcccgcgggcggcgtggcgcgcgtggagatgcgcatcggcgtgtgcgaccggctcagcgtcgcggaccggaacggcgtgcggcgggtccccgtcggcgagcacaggctgatgatcggcgagctcacgcactcggtctcgctcggcgtcgagcagctcggggtataaccggatgcttgaacggaaggtggaggatccagagtaataattgtgatgtgatgtgttgtttcgggtggggggtattattggcttctgattgccggggtgcttgctgctgtctctgcaaaggtggagatgggagatgtagaaggcaccggattactgaaaattgctggattgaaaacgaaaacgattgaaatggaaggaagacagaagaatgttgtttccctcctcaaaaaaaaaaaaaaaaa

SEQ ID NO: 5196 - DNA, 1397 bp, Zea mays; identical to SEQ ID NO: 1153

SEQ ID NO: 5197 - DNA, 1182 bp, Oryza sativa Japonica Group
atggcggcggtggcggtggcgtttgctgtagtggtggccgcgacgatgagcagcgcgcaacttgacccgcacttctacgacggcttgtgcccggcggcgctgcccaccatcaagcggatcgtcgaggaggccgtcgcggcggagccccgcatgggcgcctcgctcctgcgcctgcacttccacgactgcttcgtcaacgtaagtaaatcaaatcggcatcgatcagcatggcatgaacacgttaagatcttgttgattgttttcttgatcgatcgatctgtcgatatgcttgtgatgatcggtaatggatggacatatgcgtgatcagggttgcgacgggtccatcctgctggacgacacgccattcttcacgggggagaagaacgcggcgcccaacatgaactccgtccgcggcttcgacgtcatcgaccgcatcaaggacgccgtcaacgccgcctgccgccgcaacgtcgtctcctgcgccgacatcgtcgccgtcgccgcgcgcgactccatcgtcaccgtgcgtaccatacctgaaacctagctttggcaatggcatcgctcactgaactgaatgcattcatgcatgtgtgtgtgcgcgcgcagctgggagggccgtcgtaccacgtgccgctgggccggagggacgcgcggacggcgagccaggcggcggcgaacagcagcatcccggcgccgacgctcaacctcgacggcctcgtctccagcttcgccgcgcagggcctctccgtgcaggacctcgtcctcctctccggcgcccacacgctgggcttctcccgctgcaccaacttccgcgaccgcctctacaacgagacggccacgctcgacgcctccctcgccgcgtcgctcggggggacctgcccgcgtaccgccggcgccggcgacgacaacctcgcgccgctcgacccgacgccggcgaggttcgacgccgcgtactacgcctcgctgctgcgcgccagggggctcctgcactcggaccagcagctgttcgccggcggcggcctcggcgccaccgacgggctcgtcaggttctacgccgccaacccggacgcgttccggcgagacttcgccgagtccatggtgaggatggccagcctgagcccgctcgtcgggagccaaggcgaggtccgcgtcaactgcaggaaggtgaactactactag

SEQ ID NO: 5198 - DNA, 1327 bp, Hordeum vulgare subsp. vulgare
ggacaccgatggtacataatcagccaattaagctgatttgtacagcttgatctaacgtttgcagaagtacgtatatcagtatggcttcccgcagctgcttctctttctctatagtgtgtgttgtggcagtgatggcgtttgctatcttggccacggcgagcaatgcgcagccgctagaccctcatttctacgacaaggtgtgcccggcggcgctccccgcaataaggaaggtcgtcgaggaggccgtcgcggtggagccgcgcatgggggcctcgctcctgcgcctgcacttccacgactgcttcgtcaacgggtgtgatgggtccatcctgctcgacgacacgcccttgttcacaggcgagaagaaggccgcacccaacgtgaactcggttcgcggcttcgacgtgatcgatcgcatcaaggacgccgtcaacgccgcgtgcgggggcaacgtggtgtcctgcgccgacgtcgtggccgtcgcagcacgtgactccgtcgtcgcgctgggagggccgtcatacgacgtgcttctgggccggagggacgcgcgggtggcgagccaagccgcagcgaacaagagcatcccagcgccgaccatggacctcgacggcctcgtctccaacttcgcatcgcacggcctcaccgcgcaagacctggtcgtgctctcgggcggccacacgctgggcttctcccgctgcaccaacttccgtgaccgcctgtacaacgagacagccacattggacgcctcccttgccgcgcagctcagggggccctgcccgcttgccgccggcgacgacaacctcgcgccgcttgacccgacgccagcgcggttcgacggcgggtactacggctctttgctgcgcagccgggggctgctgcactcggaccagcagctgctcgctggcggccccagtcctagtcccacggacgcgctcgttaggttctatgccgccaacccggaggcgttcaggagggacttcgcggatgccatggtgaggatgggcggtctgatcaccgggagtggcggcgagatccgcgtcgactgcaggaaggtgacttgaactagtgtgcacgcatgcacaacaggaggtctgagccaaatgcactgtgtttccggaaacggagcatagtcgaacagtgttcttggttttaatttttagttgtgtggcttgcattttatttcattccttgaaacaggctttcgcccgctttctaaataaagcacattttattttatttcattccttttgtggggctttgtaaaattgtaagtggaaacaatgttcccggtcgtttatactttgtatgtcaatcatgtaacacg

SEQ ID NO: 5199 - DNA, 1852 bp, Zea mays
aatgatagatagctgcttgcctgctccggagtttcttccgctgttctctctcgcgcaaatttttatgctgggcaaagacggtgttcttcttcttcgacccccaaaaagggcgaagctttcgcgtccttccccacacacacaaattacctgggagccgtagcttctgtttggtgcggccacggggtggaagaaatggtatgcgggatgctcgccaattggcatgctgcgctttccgtccctgcagccgcaagaggccttctcttttagatctgtgccgcgccttcctcttcctggtaccctgtgattggagccagtattgttagcgtttaatgaagctgcttttttctagccggcttttggatggtgcttactactacatcgtatcagttgccaccactctcgcgtgcttttkgccttctttaggtttgctcgcagggcacacaaagccatttttactgctggaagactgccgcttttagtatctctgggctctggctcttgagtgatctccaaggaaagggaagggaagggaagggaagtgatgggggagtgcgaggacggcaaggagtacaggtgctgggaggagctgctgccggacgcgctggggctcatcttccgcaacctgccgctccaggaggtgctcaccgtcctgccgcgggtgtgcaagtcctgggggcgggtggtcgccggcccctactgctggcaggagatcgacatcgaggagtggagccagcagcaaagcaagccggagcagatcggccgcatggtggagctgctcgtcggccgcagcggcggctcgtgccgccggatcagcgtctccgggctgccctgcgatccgctcttctcgttcatcgcagacaatgcgcgagctcttgggaccttggagatccccaggagtgagatcagcgactccgtagtggaagccgtggcgccgcggctatcgaacgtgacgttcctagacatcagcagctgcacgaagatcggggcccgcgcgctggaggcgttcggcaggcactgcaggtccctggtggggctccggcgggtgatgcacccgatcgacctggcggacaaggtgtgccagcacgacgaggcgcacgccatcgcgcgcagcatgccgaggctgcggcacctggagatggggtacatgctggtggcgacggaggcggtgctggagatcctggagcagtgcagcgagctcaagttcctggacctgcgcggctgctgggccgtggacgaccggttcctgcgggagcgccacccggggctgcgcgtcctgggcccgcgcgtcgtcgacgactgctacgagaacagctactgggaggagtgctccgactactactcggacgaggacgaggactacgacgacgacgtcgtctcgtgggggttgttcgtggacgacgacgacgactactamtacgccgtcggcagcgacgacgacgaggctatctgggacgacgcgcagggcctggagaacctcgaggtgaggttctacggcggtggcggcttcggcgagagcttcgccggcttcgactggccgccgtcgccgtgacgcgtggcccgcgagagccgccgctgcgcttgcgttgcgcggaccgttttcggctcttgcttatataccgcgtgcgtgcctgagtcgttgtttgttgttcgtccccaagctttgcttgcagatgtaagctttcaatctttaagctctagcttgcagatatgtgaagtggactgctagtagtacactctagctgtaaactccggtgtttacctgaagcaaaccagcatgcaccggtgagatttcaccggcgccatccccatcctaaaaaaaaaaaaaaaaaaaaamcaaaaaaaaaaaaaaaaa

SEQ ID NO: 5200 - DNA, 2007 bp, Zea mays
ctggtgcccaacacatcctcattctcagggtcgccctctcgattctccctcaagtccagtccagccggatcagtccccttcccctcctccacaaggtgccgcctcccgcagatccgaattggaatctgggccttcgtctccgcaccaccaatccggtaaatatacgcgggcaataaaaatccctccctcccccccgaaccgtaatgatagatagctgcttgcctgctccggagtttcttccgctgttctctctcgcgcaaatttttatgctgggcaaagacggtgttcttcagcttcgacccccaaaaagggcgaagctttcgcgtccttccccacacacacaaattacctgggagccgtagcttctgtttggtgcggccacggggtggaagaaatggtatgcgggatgctcgccaattggcatgctgcgctttccgtccctgcagccgcaagaggccttctcttttagatctgtgccgcgccttcctcttcctggtaccctgtgattggagccagtattgttagcgtttaatgaagctgcttttttctagccggcttttggatggtgcttactactacatcgtatcagttgccaccactctcgcgtgcttttgccttctttaggtttgctcgcagggcacacaaagccatttttactgctggaagactgccgcttttagtatctctgggctctggctcttgagtgatctccaaggaaagggaagggaagggaagggaagtgatgggggagtgcgaggacggcaaggagtacaggtgctgggaggagctgctgccggacgcgctggggctcatcttccgcaacctgccgctccaggaggtgctcaccgtcctgccgcgggtgtgcaagtcctgggggcgggtggtcgccggcccctactgctggcaggagatcgacatcgaggagtggagccagcagcaaagcaagccggagcagatcggccgcatggtggagctgctcgtcggccgcagcggcggctcgtgccgccggatcagcgtctccgggctgccctgcgatccgctcttctcgttcatcgcagacaatgcgcgagctcttgggaccttggagatccccaggagtgagatcagcgactccgtagtggaagccgtggcgccgcggctatcgaacgtgacgttcctagacatcagcagctgcacgaagatcggggcccgcgcgctggaggcgttcggcaggcactgcaggtccctggtggggctccggcgggtgatgcacccgatcgacctggcggacaaggtgtgccagcacgacgaggcgcacgccatcgcgcgcagcatgccgaggctgcggcacctggagatggggtacatgctggtggcgacggaggcggtgctggagatcctggagcagtgcagcgagctcaagttcctggacctgcgcggctgctgggccgtggacgaccggttcctgcgggagcgccacccggggctgcgcgtcctgggcccgcgcgtcgtcgacgactgctacgagaacagctactgggaggagtgctccgactactactcggacgaggacgaggactacgacgacgacgtcgtctcgtgggggttgttcgtggacgacgacgacgactactactacgccgtcggcagcgacgacgacgaggctatctgggacgacgcgcagggcctggagaacctcgaggtgaggttctacggcggtggcggcttcggcgagagcttcgccggcttcgactggccgccgtcgccgtgacgcgtggcccgcgagagccgccgctgcgcttgcgttgcgcggaccgttttcggctcttgcttatataccgcgtgcgtgcctgagtcgttgtttgttgttcgtccccaagctttgcttgcagatgtaagctttcaatctttaagctctagcttgcagatatgtgaagtggactgctagtagtacactctagctgtaaactccggtgtttacctgaagcaaaccagcatgcaccggtgagatttcaccggcgccatccc

SEQ ID NO: 5201 - DNA, 1141 bp, Sorghum bicolor
agtttcttgcgctgttctctctcgcgcgcaaattattatgctgggaaagatgatattcttcccctttagctgctttgagcccaaaaggccgaagcttttgcgttcttccccacaagtatctggagccgccgtggcttttgtttggaaaggaaaggaaagggaagtgatgggggagtgcgaggacggcaaggagtacaggtgctgggaggagctgttgccggacgcgctgggcctcatcttccgcaacctgccgctgcaggagatgctcaccgtcgtgccgcgggtgtgcaagtcctgggggcgggtggtcgccggcccctactgctggcaggagatcgacatcgaggagtggagccagcagcagagcaagccggaccagatcggccgcatggtcgagctactcatcggccgcagcggcggctcgtgccgccggatcagcgtctccgggctgccctgcgatccgctcttctcgttcatcggagacaacgcacgagcccttcggacgttggagattcccaggagtgagatcagcgactcgatcgtagaaaccgtggcgccgcggctatcaaacgtcactttcctagacatcagcagctgcaccaagatcggagcccgtgccctggaggctttcggcaagcactgcaagtccctggtggggctccggcgggtgatgcacccgatcgacctggtggacaaggtgtgccagcacgacgaggcgcacgccatcgcgtgcagcatgcccaagctccggcacctggagatggggtacatgctgatcgcgacggaggcggtgctggagatcctggggcagtgccgcgacctcaagttcctggacctgcgcggctgctggaccgtggacgacaagttcctgcgggagcgccacccggggctccgcgtcctgggcccgcgcgtcgacgactgctacgagaacagctactgggaggagtgctccgactactcggacgactcctccatctactcgtgggagttcatggacgacgactactacgccgtcggaagcgacgacgaggccatctgggacgacgggcagggactggagaacctcgaggtgaggttctacggcggcggattcagcgagagcttcgccggcttcgactggccaccgtcgccgtgagacctt

SEQ ID NO: 5202 - DNA, 1556 bp, Oryza sativa Japonica Group
tgctttgagccaaaaaggttagagcttttgtgttcttcccccacaaatatcccctagtgccttttgtttggccgtggtgtggaaaagcatatgaatgggggagcatctcaattggcatactgctgttgccccccagcttagctatccctttccatccctgcaagaacccttctttatagatctgtgcccttgctgttcatggaaccctgtgattgaggggtttcctcatttggtctctcactcgcggtgtaaacaaagtatatgctccaagtaagctgctacttttagctgcttctctgattcttgagtgatctccaagtgcagaaggagagggaggaggagatgggggagtgcggcggcggcgagtacaggtgctgggaggagcttctgccggacgcgctggggctcgtcttccggaacctgccgctccgggaggtgctgacggtggtgccacgggtgtgcaagtcgtggagccgggtggtggccgggccgtactgctggcaggagatcgacatcgaggagtggcggcagcagcagggcaagcccgagcagctcgtccgcatggtggagatgctcgtcgcacgcagctgcggctcctgccgccgcatcagcgtctccggcctccccggcgacccgctcttctccttcatcggagaccatgcacgggcactgaggacgctggagattccacggagcgagatcagcgacgcggcggtggagagcgtggcgccgaggctgcccaacgtgacgttcctggacatcagcagctgcaccaagatcggggcgcgcgcgctggaggcgttcggcaagaactgcaagtcgctggtggggctccggcgggtgatgcacccgacggacgtcgccggcaaggcgtgccagcgcgacgaggcgcgcgccatcgcctgcaccatgccgaggctccggcacctggagatgggctacatggtgatcgcgacggatgcggtgctcgacatcctcgcgcggtgccgcgacctccggttcctcgacctccgcggctgctgggccgtcgacgacaagttcctgcaggagaggcacccggggctgagggtgctcggccccggcgtcgacgactgcttcgagaacagctacctggaggagtgctccgactactccgacgactcctccatctactcgtgggagctcatggaggacgacgacgacgactactacgccgtcgggagcgacgacgaggccatttgggacgacggccagggcctcgagaacctggaggtcaggttctacggcggcggcttcagcgagagctatgctggcttcgattggccaccatcaccatgaccatgagagcagctcagctcagctcagtccctgacctcactgtccttgctcttcctctcgagccgtgtacctaagcttgcagttgcagtctcgcagatgtgttgttgtactctgtgtgtgtgcgcgtgtgccagtgtgtcatcagcatcactagcttgcagtgcagatatgtgtgagtgaacttctacggctagttgttactactactacatccagatgtaaactttggtgtttacatg

SEQ ID NO: 5203 - DNA, 1469 bp, Zea mays
cagatatctggagccgtagcttctgtttggtatggccgtgggttgaaataaatagtagtgtgcgggacgcccaccaattggcacgctgcgctttccatccctgcagctgcaagatgccttctttttagatctgtgctgccgtgccttcctcttcatggttgcattctttgggtttgctcacagcgcacacaaagccattttactgctgggaatggtggctggcactattagcgtctccggctcttgagtgatctccaagggaagtgaagtgatgggggagtgcgaggacggcaaggagtacaggtgctgggaggagctgctgccggacgcgctgggcctcatcttccgcaacctgccgctgcaggaggtgctcaccgtcctgccgcgggtgtgcaagtcctgggggcgggtggtggccggcccctactgctggcaggagatcgacatcgaggagtggagccagcagcagggcaagccggagcagatcgcccgcatggtcgagctactcgtgggccgcagcgccggctcgtgccgccggatcagcgtctccggcctgccctgcgatccgcgcttctccttcatcggagacaacgcacgagctctccggaccttggagatccccaggagcgagatcagcgactccatggtggaatccgtggcgccgcggctgccgaacgtcactttcctcgacatcagcagctgcacgaagatgggggcccgcggcctggaggcgttcggcaagcactgcaagtccctggcggggctgcggcgggtgatgcacccgatcgacctggcggacagggcgtgccagcacgacgaggcgcacgccatcgcgtgcagcatgcccaggctgcggcacctggagatggggtacatgctggtggcgacggaggcggtggcggagatcctggggcggtgccgcgagctcaggttcctggacctgcgcggctgctgggcggtggacgacaagctcctgccgcgcgaccgccacccggggctgcgcgtcctgggaccccgcgtcgacgactgctacgagaacagctactgggaggagtgctccgacgactactcggacgactcctccatctactcgtgggagctcatggacgacgtcgacgacgactacgactacgccgccggcagcgacgacgacgacgacgaggccgtctgggacgacgacggccagggcctggagaacctggaggtcaggttctacggcggtggcttcggcgagaccttcgccggcttcgactggccgccgtcgccgtgacatgacacctgctgcctgcgcttgcgttgcttgcgtgggtgggtgagcctttgtgtgttgtccccaagctttggaagcttgctgtgctgctgtagtactgtgcctgcgacatcactcgatcttcctctacctcgcagatatgccatatgtgaagcgaactgctagtggtgcaatctaaaatgtagacgctggtgtttac

SEQ ID NO: 5204 - DNA, 1326 bp, Zea mays
gccactagctctccgctctcgcctctcggccttctccttgtgccgccgaacaccctcacaagagtcggcctctcgatttctcagtccagccgcagcagcccccttccctccctcctccatcaggtgttgcctcccgcagatccaagtcggaattcggtccttcgtccccaaaccaccaatccgtcctttggaatgctacagggaagtgaagtgatgggggagtgcgaggacggcaaggagtacaggtgctgggaggagctgctgccggacgcgctgggcctcatcttccgcaacctgccgctgcaggaggtgctcaccgtcctgccgcgggtgtgcaagtcctgggggcgggtggtggccggcccctactgctggcaggagatcgacatcgaggagtggagccagcagcagagcaagccggagcagatcgcccgcatggtcgagctactcgtgggccgcagcgccggctcgtgccgccggatcagcgtctccggcctgccctgcgatccgcgcttctccttcatcggagacaacgcacgagctctccggaccttggagatccccaggagcgagatcagcgactccatggtggaatccgtggcgccgcggctgccgaacgtcactttcctcgacatcagcagctgcacgaagatcggggcccgcgggctggaggcgttcggcaagcactgcaagtccctggcggggctgcggcgggtgatgcacccgatcgacctggcggacagggcgtgccagcacgacgaggcgcacgccatcgcgtgcagcatgcccaggctgcggcacctggagatggggtacatgctggtggcgacggaggcggtggcggagatcctggggcggtgccgcgagctcaggttcctggacctgcgcggctgctgggcggtggacgacaagctcctgctgcgcgaccgccacccggggctgcgcgtcctgggaccccgcgtcgacgactgctacgagaacagctactgggaggagtgctccgacgactactcggacgactcctccatctactcgtgggagctcatggacgacgtcgacgacgactacgactacgccgccgccggcagcgacgacgacgaggccgtctgggacgacgacggccagggcctggagaacctcgaggtcaggttctacggcggtggcttcggcgagaccttcgccggcttcgactggccgccgtcgccgtgacacctgctgcctgcgcttgcgttgcgtgcttctactgcgtgcgtgggtgggtgagcctttgtgtgttgtccccaagctttggttgctgtgctgctgtagtactgtgcctgcgacatc

SEQ ID NO: 5205 - DNA, 1444 bp, Zea mays
ctctcgatttctcagtccagccgcagcagcccccttccctccctcctccatcaggtgttgcctcccgcagatccaagtcggaattcggtccttcgtccccaaaccaccaatccggttgcattctttgggtttgctcacagcgcacacaaagccattttactgctgggaatggtggctggcacttagcgtctccggctcttgagtgatctccaagggaagtgaagtgatgggggagtgcgaggacggcaaggagtacaggtgctgggaggagctgctgccggacgcgctgggcctcatcttccgcaacctgccgctgcaggaggtgctcaccgtcctgccgcgggtgtgcaagtcctgggggcgggtggtggccggcccctactgctggcaggagatcgacatcgaggagtggagccagcagcagagcaagccggagcagatcgcccgcatggtcgagctactcgtgggccgcagcgccggctcgtgccgccggatcagcgtctccggcctgccctgcgatccgcgcttctccttcatcggagacaacgcacgagctctccggaccttggagatccccaggagcgagatcagcgactccatggtggaatccgtggcgccgcggctgccgaacgtcactttcctcgacatcagcagctgcacgaagatcggggcccgcgggctggaggcgttcggcaagcactgcaagtccctggcggggctgcggcgggtgatgcacccgatcgacctggcggacagggcgtgccagcacgacgaggcgcacgccatcgcgtgcagcatgcccaggctgcggcacctggagatggggtacatgctggtggcgacggaggcggtggcggagatcctggggcggtgccgcgagctcaggttcctggacctgcgcggctgctgggcggtggacgacaagctcctgctgcgcgaccgccacccggggctgcgcgtcctgggaccccgcgtcgacgactgctacgagaacagctactgggaggagtgctccgacgactactcggacgactcctccatctactcgtgggagctcatggacgacgtcgacgacgactacgactacgccgccgccggcagcgacgacgacgaggccgtctgggacgacgacggccagggcctggagaacctcgaggtcaggttctacggcggtggcttcggcgagaccttcgccggcttcgactggccgccgtcgccgtgacacctgctgcctgcgcttgcgttgcgtgcttctactgcgtgcgtgggtgggtgagcctttgtgtgttgtccccaagctttggttgctgtgctgctgtagtactgtgcctgcgacatcactcgatcttcctctacctcgcagatgtgccatatgtgaagcgaactgctagttctagtgcaatctaaaatgtaaacgctggtgtttacaaaaaaaaaaaaaaaa

SEQ ID NO: 5206 - DNA, 1441 bp, Oryza sativa Japonica Group
gcatcctctgcgtctctccctcctccctctgcagcgccgagccggaggaatcctgaccggaggtcggcctcgccctcccctcctcgcgcgcgcgccgccgccgccgggaaggccggctggcgaggtagtcgaaaaatatcgcctctgaaggtcagcactgaggcatgggggagtgcagtgagcacaggtgttgggacgagctactaccggacgcactgggcctcatctttcgcaaactctcactcaaggatgtgctcaccgtggtgccgcgggtttgcaaatcctgggggcgggtggttgcagggccttactgctggcaggagatcgacatccaggagtggagccagcagcagagcaagccggaccagctcaagcgcatggttcgcatgctcgtcgcccgaagcggcggctcgttccaccgcattagcgtgtccggcctgcctggcgatccattgttcaccttcattggggaccatgcacggtcacttaaaaccatggagcttccaaggagtgatatcagcgactccttagtggaaaatgttgcgccaagattgtccaacgttacattcttggacataagcagctgtactaagatcggtgctcgtgctctagaagcattcggcaagcattgtaaatccctgatcggacttcggcgagtcatgcaccctacagatgttgtcggtagggccagtcaacatgatgaggctcgtgctattgcttgcaatatgccaaagctccgtcatcttgagatagggtacatgctcattgcaacgaaggctgttgttgagattgcctctcagtgtcatgatctcaaattcttagatctgcgtggctgctggaatgttgacgataaactattgcaagagagctatcctgggctgaaagtcgttggcccctatgtggacgactgctatgagaacagcttctgggaggagtgttccgatgactcggatgattccatctattgggagctcatggatgatgattattatgcggcggggagcgatgacgagggcatatgggacgatggtcaaggtcttgagggcttagaagtaaggttttatggtggtggatttagtgaaagccatgctggttttgattggccgccatctccatgaaagctgcatcaagatcttcagaaaagtgcctgtgtattcctgctgcttcctcttatgtgcttcaagttttaaacatcagcttccttagtactagtatgtgcttgtatttgtgtcatcccctagcttgcagatatttgaagccaactatctggtagtataaaatgtttggtgtttatacataaaaaatagcaacatggtctggtagtactgaaacaatgttgctacaaatttgtttcagtactagtaatttatttcagaggttttccatgcgcctgtaatcctgtactagttctcttttatactgcggttctatgacttctact

SEQ ID NO: 5207 - DNA, 1366 bp, Hordeum vulgare subsp. vulgare
gaaagactttccggtcctctcgccgaccacctcacccctccactgttacactcaactctgtctccctccccaccccacacccctcctccttccctaccgagacgccctccacagatccaaggagcgtcgccaccgccaccgccaccacctccgccgcggcccggtggatcatacaacttgcatgatcagtcctggaaggatcagggatggaagagcacggtgagcagagatgttgggaggacctattgccagatgccctggggctcatcttccgcaacctctcccttcaggagatgctcaccgtggttccccgggtttgcaaatcctggagccgggtggtctcaggtccctactgctggcaggagatcgacatccaggagtggagccagcagcagaacaagcctgaccagctcgcccgcatggttcatacgctcgtcactcgcagcgatggctcgttccgccgcattagcgtgtccgggcttccaagcgactcgttgttcaccttcatcgcaaaccatgcgagatctctcaagaccctggagcttccgaggagcgagatcagcgactgcatagtggaagatgttgcgcaaagactgtccaacgtcacattcctggacgtcagcagctgcaccaagatcggcgcgcgtgcactggaggcgttcggcaagaactgcaagtccctcgtcgggctccggcgggtcatgcaccccatagacgtcgccggcaaggtgtgccagcatgacgaggcccgcgccatcgccggcagcatgccgaagctccggcacctggagattgggtacatgctgatcgcgaccaacgccgtggtggagatcgcgtcccggtgccacgacctcaagttcctggacctgcgcggctgctggggcgtggacgacaagctcctgcaggagaagtaccccgggctgaagatcctgggcccccgtgtggacgactgctacgagaacagcttcctggaggagtgctccgacgactcggacgacgacgacgactccatctactcatgggaggagttcatggacgacgaggacgacgacgactacttcgccgccgaggccctgtggcacgacgaccacgccctcgaggggcttgaggtcaggttctatggcggcgggttcggcgaaggcgaaggctttgccggcttcgactggccagagtccccatgaatcaagccgtctgcctgcatcaaataagttaccgagagaagtggagtgcctctgcttgcttgcttgcttgctcctgctgctatctttatagcatgttccaactttggagcatcttcttccgtgtccatgtgcttgtaattgtgtcaaattgtgttgctatctctagctgcttgcagatattggcc

SEQ ID NO: 5208 - DNA, 3537 bp, Sorghum bicolor
atggcgtcgggcagccgcgccacgcccacgcgctccccctcctccgcgcgacccgaggcgccgcgtcacgcgcaccaccaccaccaccaccactcgcagtcgtcgggcgggagcacgtcccgcgcgggcgggggaggtggaggaggaggaggtggcgggggcaccgcggccacggctacggccacggccacggagtcggtctccaaggccgtggcgcagtacaccctagacgcgcggctccacgcggtgttcgagcaatcgggcgcgtcgggccgcagcttcgactactcccagtcgctgcgcgcgccgcccacgccgtcctccgagcagcagatcgccgcctacctctcccgcatccagcgcggcggccacatccagcccttcggctgcacgctcgccgtcgccgacgactcctccttccgcctcctcgccttctccgagaacgccgccgacctgctcgacctgtcgccgcaccactccgttccctcgctcgattccgcggcgccgccccccgtttccctgggtgccgacgcgcgcctcctcttctccccctcgtccgcggtcctcctggagcgcgccttcgccgcgcgcgagatctcgctgctcaacccgctatggatccactccagggtctcttccaagccgttctacgccatcctccaccgcatcgacgtcggcgtcgtcatcgacctcgagcccgcccgcaccgaggaccccgctctctccatcgccggcgcagtccagtcccagaaactcgcggtccgtgccatctcccgcctccaggcgctacctggcggggacatcaagctcctctgcgacacagtcgtggagcatgttcgcgagctcacgggttacgaccgtgtcatggtgtacaggttccatgaagacgagcatggggaagttgtcgccgagagccggcgcgataaccttgagccttacctcggattgcattatcccgccacagatatcccccaggcatcgcgcttcctgttccggcagaaccgcgtgcggatgattgctgattgccatgccaccccggtgagagtcatacaagatcctgggatgtcgcagccactgtgtttggtaggctccacgcttcgtgctccacacgggtgccatgcgcagtacatggcgaacatggggtcaattgcatcacttgttatggcagtcatcattagcagtggtggtgatgacgagcaaacaggtcggggaggcatctcctcggcaatgaagttgtgggggttagtggtgtgtcaccatacgtcaccacggtgtatcccttttccattgaggtatgcttgcgagtttctcatgcaggcatttgggctgcagctcaacatggaattgcagcttgcgcatcagctgtcagagaagcacattttgcgaactcagacgctattgtgtgacatgctattgcgagattcaccaactggcatcgtcacgcagagccccagcatcatggaccttgtgaagtgtgatggggctgcactgtattatcatgggaagtactatccattgggtgtcactcccactgagtctcagattaaggatatcattgagtggttgacggtgtgtcatggggactcaacagggctcagcacagacagccttgctgatgcaggctaccttggtgctgctgcattaggggatgctgtgtgtggaatggcggtggcttatattacaccgagtgattacttgttttggtttcggtcacacacagctaaagagatcaaatggggtggcgcaaagcatcaccctgaggataaggatgatggtcagaggatgcacccacggtcatcattcaaggcatttcttgaagtggttaaaagcagaagcctaccatgggagaatgcagaaatggacgcgatacattccttgcaactcatattgcgtgactccttcagagatgctgcagagggcactagcaactcaaaagccattgtcaatggacaagttcagcttggggagctagaattgcgggggataaatgagcttagctctgtagcaagagagatggttcggttgatagagacagcaacagtacccatatttgcagtagatactgatggatgtataaatggttggaatgcgaaaattgctgagttgacaggcctttcagttgaggaggcaatgggcaaatctctggtaaacgatcttatcttcaaggaatctgaggagatagtcgaaaagctactctcacgagctttaagaggtgaggaagacaaaaatgtggagataaagttgaagacatttgggtcagagcaatctaacggagcaatatttgttattgtcaatgcttgttccagtagagattacacacaaaatattgttggtgtctgttttgttggacaagatgtcacaggacaaaaggtggtcatggataaatttatcaacatacaaggggactataaagctattgtacacaatcctaatcctctgatacccccaatttttgcatcagatgagaacacttcttgttcagaatggaacacagccatggaaaaacttacaggatggtcgagaggtgaagttgttggtaaatttcttattggagaggtgtttggaagtttttgtcgactcaagggcccagatgcattgacaaagttcatggttgtcattcacaatgctataggagggcaggattatgagaagttccctttttcatttttcgacaagaatggaaagtatgtgcaggccttattgaccgccaacacaaggagcaaaatggatggtaaatccattggcgccttttgttttttgcagattgcaagcgctgaaatacagcaagcctttgagattcagagacaacaagaaaagaagtgttatgcaaggatgaaagaattggcctatatttgccaggagataaagaatcctcttagtggcatccgatttaccaactctctgttgcaaatgactgatttaaatgatgatcagaggcagttccttgaaacttgctctgcttgtgagaaacagatgtccaagattgttaaggacgccactctccaaagtattgaggacggctctttggtacttgagaaaagtgagttttcttttggagacgttatgaatgctgttgtcagccaagcaatgttattgttgagggagagggatttacaacttattcgggatatccctgatgaaatcaaggatgcatcagcatatggtgatcaatttagaattcaacaagttttggctgacttcttgctaagcatggtgcgatctgctccgtccgagaatggctgggtagaaatacaagtcagaccaaatgtaaaacagaattctgacggaacagatacagagcttttcatcttcaggtttgcctgccctggtgagggccttcccgctgacattgtccaggatatgttcagcaattcccagtggtcaacccaagaaggcgtaggactaagcacatgcaggaagatcctcaaattgatgggcggtgaggtccaatacatcagggagtcagagcggagtttcttcctcatcgtcctcgagctgccccagcctcgtccagcagctgatagagaaatcagttga

SEQ ID NO: 5209 - DNA, 3934 bp, Zea mays
atggcgtcgggcagccgcgccacgcccacgcgctccccctcctccgcgcggcccgaggcgccgcgtcacgcgcaccaccaccaccactcccagtcgtcgggcgggagcacgtcccgcgcgggcgggggagccgcggccacggagtcggtctccaaggccgtcgcccagtacaccctagacgcgcgcctacacgcggtgttcgagcaatcgggcgcgtcgggccgcagcttcgactactcccaatcgctgcgcgcgccgcccacgccgtcctccgagcagcagatcgccgcctacctctcccgcatccagcgcggcggccacatccagcccttcggctgcacgctcgccgtcgccgacgactcctccttccgcctcctcgccttctccgagaactcccccgacctgctcgacctgtcgcctcaccactccgttccctcgctggactcctctgcgccgccccacgtttccctgggtgccgacgcgcgcctcctcttctccccctcgtccgcggtcctcctagagcgcgccttcgccgcgcgcgagatctcgctgctcaacccgatatggatccactccagggtctcctccaagccgttctacgccatcctccaccgcatcgacgtcggcgtcgtcatcgacctcgagcccgcccgcaccgaggaccccgctctctccatcgccggtgcagtccagtcccagaaactggcggtccgcgccatctcccgcctccaggcgctacccggcggggacgtcaagcttctctgcgacacagtcgtggagcatgttcgcgagctcacgggttatgaccgtgtcatggtgtacaggttccatgaagacgagcacggggaagttgtcgccgagagccggcgcgacaaccttgagccttacctcggattgcattatcccgccacagatatcccccaggcgtcgcgcttcctgttccggcagaaccgcgtgcgaatgattgccgattgccatgccaccccggtgagagttattcaagatcctgggctgtcgcagcctctgtgtttggtaggctccacgctacgcgctccacacgggtgtcatgcacagtacatggcgaacatggggtcaattgcgtcgcttgttatggcagtcatcattagcagtggcggtgacgatgagcaaacaggtcggggtggcatctcgtcggcaatgaagttgtgggggttagtggtgtgccaccatacatcaccacggtgtatcccttttccattgaggtatgcttgcgagtttctcatgcaggcatttgggttgcagctcaacatggagttgcagcttgcgcaccagctgtcagagaagcacattctgcgaactcagacgctattgtgtgacatgctactacgagattcaccaactggcatcgtcacgcagagccccagcatcatggaccttgtgaagtgcgacggggctgcactgtattatcatgggaaatactatccattgggtgtcactcccactgagtctcagattaaggatatcatcgagtggttgacggtgtttcatggggactcaacagggctcagcacagatagcctggctgatgcaggctaccttggtgctgctgcactaggggaggctgtgtgtggaatggcggtggcttatattacaccgagtgattacttgttttggtttcggtcacacacagctaaagagatcaaatggggtggcgcaaagcatcaccctgaggataaggatgatggtcagaggatgcacccacggtcgtcattcaaggcatttcttgaagtggttaaaagcagaagcctgccatgggagaatgcagaaatggacgcaatacattccttgcagctcatattgcgtgactccttcagggatgctgcagagggcaccaacaactcaaaagccattgtcaatggacaagttcagcttcgggagctagaattgcgggggataaatgagcttagttccgtagcaagagagatggttcggttgatagagacagcaacagtacccatatttgcagtagatactgatgggtgtataaatggttggaatgcaaagattgctgagttgacagggctttcagttgaggaggcaatgggcaaatctctggtaaatgatcttatcttcaaggaatctgaggcgacagttgaaaaactactctcacgagctttaagaggtgaggaagacaaaaatgtggagataaagttgaagacatttgggtcagagcaatctaagggaccaatatttgttgttgtcaatgcttgttctagtagagattacacacaaaatattgttggtgtctgttttgttggacaagatgtcacaggacaaaaggtggtcatggataaatttgttaacatacaaggggactacaaagctattgtacacaatcctaatcctctgataccaccaatttttgcatcagatgagaacacttcttgttcagaatggaatacagccatggaaaaacttacaggatggtcgagaggtgaagttgttggtaagtttcttattggagaggtgtttggaaattgttgtcgactcaagggcccagatgcattgacaaaattcatggttattattcacaacgctataggaggacaggattatgagaagttccctttttcattttttgacaagaatggaaagtatgtgcaggccttattgaccgccaatacaaggagcaaaatggatggtaaatccattggagccttttgtttcctgcagattgcaagcactgaaatacagcaagcctttgagattcagagacaacaagaaaagaagtgttacgcaaggatgaaagaattggcctatatttgccaggagataaagaatcctcttagtggcatccgatttaccaactctctgttgcagatgactgatttaaatgatgaccagaggcagttccttgaaactagctctgcttgtgagaaacagatgtccaagattgttaaggacgccagtctccaaagtatcgaggacggctctttggtgcttgagcaaagtgagttttctcttggagacgttatgaatgctgttgtcagccaagcaatgttattgttgagagagagggatttacaacttattcgggacatccctgatgaaatcaaggatgcgtcagcgtatggtgatcaatgtagaattcaacaagttttggctgacttcttgctaagcatggtgcggtctgctccatccgagaatggttgggtagaaatacaagtcagaccaaatgtaaaacagaattctgatggaacaaatacagaacttttcatattcaggtttgcctgccctggtgagggcctccctgctgacgtcgtccaggatatgttcagcaattcccaatggtcaacacaagaaggcgtaggactaagcacatgcaggaagatcctcaaattgatgggtggcgaggtccaatacatcagagagtcagagcggagtttcttcctcatcgtcctcgagcagccccaacctcgtccagcagctggtagagaaatcgtctgatatgttaagatccgtgctgaccccacctaactttctcggccgattacataacttagccccctgataagagggtgcctaatttacgagaagcctggaaacaaatcaaagctgccatggcaattcaatgactgaagtgttgttgatgaggctgttttcagtgcaccgctatccatggccatgctgtggtttcaagaccagagttggcggatagttacgtacacaggcggcaaatgtgtctcttagccgctgtttaagtgcaccgctgtaagtttgggtgtccatgtccatgctgtggtttcaagatcagagtccatggcggatagttatgtacacaagcgacaaacgtggttcttagcttaggttcatgaccagttccacgtagtacatatagcttatatgtatatatacaatctattttttactatgcataaggagttgtttcagctta

SEQ ID NO: 5210 - DNA, 3501 bp, Zea mays
atggcgtcggacagtcgcccccccaagcgctccccctccgcgcgacgcgtggcgccgcgtcacgcgcaccaccaccactcgcagtcgtcgggcgggagcacgtcccgcgcaggcgcgggaggaggtggcgggggcgctgcggccacggagtcggtctccaaggccgtcgctcagtacaacctagacgcgcggctccacgcggtgttcgagcagtcgggcgcgtcgggccgcagcttcgactactcccagtcgctgcgcgcgccgcccacgccgtcctccgagcagcagatcgccgcctacctctcacgcatccagcgcggcggccacatccagcccttgggctgcacgctcgccgtcgccgacgactcctccttccgcctcctcgccttctctgagaacgccgccgacctgctcgacctgtcgccgcaccactccgttccctcgctcgactccgtggcgctgccccctgtttcccttggtgccgacgcacgcctctacttctccccctcgtccgcggtcctgctggagcgcgccttcgccgcgcgcgagatatcgctgctcaacccgctatggatccactccagggcctcctccaagccgttctacgccatcctccaccgcatcgacgtcggcgtcgtcatcgacctcgagcccgcacgcaccgaggaccccgctctctccatcgccggcgcagtccagtcccagaaactcgcggtccgcgccatctcccgcctccaggcgctacccggcggggacgtcaagctcctatgcgacacagtcgtggagcatgttcgcgagctcactggttacgaccgtgtcatggtgtacaagttccatgaagacgagcacggggaagttgtcgcagagagccggcgcgataaccttgagccttacctcggattgcattatcccgccacagatatcccccaggcgtcgcggttcctgttccagcagaaccgcgtgcgaatgatcgcagactgccatgccatcccggtgagagtcatacaagatcctgggctgtcgcagcagctgtgtttggtaggctccacgctacgcgctccgcacgggtgccatgcacagtacatggcgaacatggggtcaattgcgtcgcttgttatggcagtcatcattagcagtggtggtgacgacgagcgaacaggtcggggtgccatctcctcatcaatgaagttgtgggggttagtggtgtgccaccatacatcaccacggtgtatcccttttccattgaggtatgcttgcgagtttctcatgcaggcatttgggctgcagctcaacatggagttgcagcttgcgcaccagctgtcagagaagcacattttgcgaactcagacgctattgtgtgacatgctactgcgagattcaccagctggcatcatcacgcagagccccagcgtcatggaccttgtgaagtgcgatggggctgcactgtattatcgtgggaagtactacccattgggtgtcactcccaccgagtctcagattaaggatattatcgagtggttgacggtgtgtcatggggactcaacagggctcagcacagatagccttgctgatgcaggctaccttggtgctgttgcattaggggatgctgtgtgtggaatggcggtggcttatataacaccaagtgattacttgttttggtttaggtcacacacagctaaagagatcaaatggggtggcgcaaaacatcaccctgaggataaggatgatggtcagaggatgcacccacggtcatcattcaaggcatttcttgaagtggttaaaagcagaagcctgtcctgggagaatgcagaaatggacgcaatacattccttgcagctcatattgcgtgactccttcagagatgctgcagagggcactagcaactcaaaagccattgtcaatggacaacgtcaacttggggagctagaattgcgggggataaatgagcttagctctgtagcaagagagatggttcgattgatagagacagcaacagtacccatatttgcagtagatactgatggatgcataaatgggtggaatgcaaagattgccgagttgacaggcctttcagttgaggaggcaatgggcaaatctctggtaaatgatcttatcttcaaggaatgtgatgatatagtcgaaaagctactctcgcgagctttaagaggtgaggaagacaaaaatgtggagataaagctgaagacatttgggtcagagcaatctaagggtgcaatatttgttattgtcaatgcttgttccagcagagattacacacaaaatattgttggtgtctgttttgttggacaagatgttacaggacaaaaggtggtcatggataaatttatcaacatacaaggggactacaaagctattgtacacaatcctaatcctctgctacccccaattttcgcatcagatgagaacacttcttgttcagaatggaacacagccatggaaaaacttacaggatggtctagagaggaagttgtcggtaagtttcttattggagaagtgtttggaaattgttgccgactcaagggcccagatgcattgacaaagttcatggttgtcattcacaatgctatagaaggacatgattctgagaagttccctttttcatttttcgacaagaatggaaagtatgtgcaggccttattgacggccaacacaaggagcaaaatggatggtaaatctattggagccttttgtttcttgcagattgcaagcgctgaaatacagcaggcatttgagattcagagacaacaagaaaagaagtgttatgcaaggatgaaagaattggcctatatttgccaggagataaagaatcctcttagtggcatccggtttaccaactctctattgcagatgactgatttaaatgatgaccagaggcagttccttgaaactagctctgcttgtgagaaacagatgtccaagattgttaaggatgccagtctcaaaagtattgaggatggctctttggtgcttgagaaaagtgagttttctcttggagacgttatgaatgctgttgtcagccaaacaatgtcattgttgagggagagggatttacaacttattcgagatatccctgatgaaatcaaggatgcatcagcatatggtgatcaatttagaatccaacaagttttggctgacttcttgctaagcatggcacagtctgctccatccgagaatggctgggtagaaatacaagtcagaccaaatgtaaaacagaattatgacggaacagatacagagcttttcatcttcaggtttgcctgccctggtgagggcctccccgctgacattgtccaggatatgttcagcaattcccaatggtcaacccaagaaggcgtaggactaagcacatgcaggaaaatcctcaaattgatgggcggcgaggtccaatacatcagggagtcagagcggagtttcttcctcatcgtccttgagctgccccaacctcgtctagcagctggtagagaaaatcagctgatatgttaa

SEQ ID NO: 5211 - DNA, 2351 bp, Zea mays
cgcgagctccagatcgcacttgccagccttgagccactaatcacctggcagcactctacacggcgagagggaatcgaggagagcttacgaggtagttagtagctacaagacacagcaccataggcatgccggaggcgccggtcgtcacaatgcgagacacggcggcggcggcgccgcccgcgactcaccgcgacctgctcgagtacatcgagcgcgtgacggcgggggcggcccaggtgcagcgccgcgtcctgtcggagatcctggcgcagaacgcgccggcggagtacctgcggcggctgggcgtctcgggcgccgcgccgggcgccgtggaggcgttccgccgcgccgcgccgctcgtcacctacgaggacatcctgcccgacgtgctgcgcatcgccaacggggacacgtcgcccatcctctccggcaagcccatccgcgagttcctcaccagctccggcacgtccggaggggagcgcaagctgatgccggcgatagccgacgagatggaccggcggtcgctgctgtacagcctgctgatgccggtgatgagccaggccgtgccggggctggacaggggcaggtgcatgtacctctacttcgtgaaggcggggtcgcgcacgccgggcggccacccggcgcgccccgtgctgacgagcttctaccggagccgccacttcctggagcgcccgcacgacccctacaccgtgcacaccagccccgacgaggccgtcctctgcgtggacgcgtaccagagcatgtacgcgcagctgctgtgcggcctggtgcaccgcgccgacgtgctccgcgtgggcgccgtcttcgcgtcgggcttcctccgcgccatccgcttcctggagaagcactggcagcgcctgtgccgggacctccgcaggggcgcgctcggtgccgaggtgaccgaccgctccgtgcgcgccgccgtggcgcgggtgctccgcgccgacccggcgctcgccgacgccgtcgaggccgagtgcgccaggccgtcgtggcaggggatcatccggagggtgtggcccggcaccaagtacatcgacgtcatcgtcaccggcgccatggcgcagtacatccccacgctcgagttctacggcggcgggctgccgctcacctgcaccatgtacgcgtcctccgagagctacttcggcatcaacctcaaccccatgtgcaagcccagcgaggtcgcgtacaccctcatccccacaatgtgctacttcgagttcctgcccttgccacagcccggccccggcggcaccgacgacgccgatcccgaccatcgcgacctcgtggacctcgtcgacgtcaagctcgggcacgagtacgagctcgtcgtcaccacctactcaggtctgtaccgctaccgcgtgggcgacgtgctgcgcgtggccgggttcaagaaccaggcgcccatgttcaagttcctgcggcggaagaacgtggtgctgagcatcgactccgacaagaccgacgaggcggagcttcacgcggcggtgagcggcgcggtgcagcacctggcgccgttcggcgcgtcgctggtggagtacacgagctacgcggacgcggggaccatcccgggccactacgtgctgttctgggagctgcggctccgcgcgggggacgtgccggtgccggtgccggcgtcggtgttcgaggactgctgcctggccgtggaggaggccctgaacagcgtgtaccggcagggccgcgccgccgaccgctccatcgggccgctggagatccgggtggtgtcggacggcacgttcgacaggctcatggactacgcgctcgcccgcggcgcctccatcaaccagtacaaggtgccgcggtgcgtgcacccgggccccgtggtggagctgctggacgggcgggtgcaggccagctacgtgagccccaagtgccccaagtggagccccggcggcggtaagcagtggagcagcgacgccgccgccaagaagcccgccgccgccgccggcagcaataatggaggaggggcggtcgtcgcctgatcgtcgtccgtcgagatatactagtgaactttaattaattagctggctaattccggaaccgtcgttgttgttcgtgggagagagagactcgatcttgtggtcgatcgattgtgatagctgatctatccgtgtgcatgtatgcatgcatggctacgatcgaatgattatctagctgggtaatcatcgggtgtgtggtagcttattaagtattgtacgcgtcgtgatatcatgtgagctagcttttgtttctttttattttcttttatgtggttttgtaataaagttggagtacgtagtagtgagtggcccttttgtttttttgac

SEQ ID NO: 5212 - DNA, 1878 bp, Zea mays
aaaaatacactacgaccaccaccaagcgaacgaaccaacgatcgacgctccccgaccagcgtggtgaacaggacagcagtccagccaatggaggcagcactgacgcagcaggcggcagcgacggcgacggcgacaccgacgaggtggcggtgcgtgggggacgcgtcgctggctagccatggccagggccagcagcgagcaggcgccgtccggctcggagcggcgcggcgtgcggtcagcggggctgtccgggctagcagcagcaggcatctgggccccgtgcgggcgctcgtctccgaggccgccggcggcgagcgggcggcggagggcgagggaatggacaccgcggtgaggctgttcgtgggcctccccgcggacgcggtggtctccgacggccgcggcgtgggccgccccagggccgtctcggcggcgctgcgcgcgctcaagctgctcggcgtcgacggcgtggagctgcsggtgtcctgggccgtcgcgcagcccgggccsgggggctggttcgagtgggccgggtaccgcgccgtcgccgccatggtccgcgacgcggggctcgacctccgcgtctcgctccgcaccgacggcgacgcgctccccggatgggtggccgacgcggcggccgccgaccccgacgtcctcttcaccgaccgctccggccaccgccgcatgggctgcctctcctttgccgtcgacgagctccccgtgctcgtcggcaagtcgccgctccaggcctacgaggccttcttccgcagctttgctgaagagttcgatgacttgttcgggtcaacgatcacggatgtgactatcagcctgggtcctaacggcgagctacagtacccgtcatacccgccggggaaccagggttcccgtggcttcgacggcgtcggcgagttccagtgctacgacaagtacatgctggcacggctgaagcgtcacgccgagtcgtcggggcagccactgtggggcctgtcgggtccacacgacgggccgcggtacgacgacgagtcgccggagtcgtccgccttcttcagagagctggggggctcgtggaagtcggcctacggggagttcttcctgtcctggtacaccggggagctcctggcgcacggcgaccgtgtcctggccgcggcgtccagcgcgttccgcggcaagcccgtggagctgtccgccaaggtgccactcctgcgagggccggggacgggcccgagccccgcggacgccaccgcgggattccacggcgggtacggcccggtcgccgagatgttcgcgcgccacggttgcgcggtgatcgcggccggcgtggaggcgcggccggacgccacggcggaggagcgcctggcccaggtcaaggccgcctgcacggagcacggcgtgcatctcgcggcggagagcgcgcctctcgccgtggcgcgcggcagcgacggcgacggccccacgcgcgtcgtctggctgtccgccgggcgcacccggccgtgccagttcacgtaccagcggatgggcgcagagttcttctcgccgggccactggccgctgttcgtgcagttcgtgcgcgcgctggagtgccccgaggaggcccatgaggacgacctgccagccagcgctgacggcggcgagcggctcactgtgccgtccgcggccgcggcggccccaaaggaccaagcgacaagggaggtgcaaaccgtgtgaatggcaaatcatttgtcgcgcattcttaatgtacagtacttcctccgttgtttagttcaaaataaacgggcgggtgataaatattcgagaatggagatggtatatagagcatctctaacctttatgtaaaaagttcctaaatcttagtttaatgagttattaaaaaaaaaaaaaaaa

SEQ ID NO: 5213 - DNA, 1873 bp, Sorghum bicolor
cactcaagcgaaccgaccagaaaagtgcaaagcgcagcgaccgacgcgtcccgaccagctgacgtggtaggcacaggacactagggaagcagccgatggaggccgcgctgatgcagcaggcggcggcggcggcggcggcgaggtggcggtgcgtgggggacgcgtcgctggcaggacacggacagcagcacctagccggcgtcgtccggctcggcgtggcgcggcgtgcggccagccgggcggtccgggccagtagtagcaccaggctgctggcccccgtgcgcgcgctcgtctccgaggccgccggcgagcgggcggcggagggcgaggaagaggagggcgcggcggtgaggctgttcgtgggcctccccgcggacgcggtggtctcggacggccgcggcgtgagccgccccagggccgtctcggcggcgctgcgcgcgctcaagctgctcggcgtcgacggcgtggagctgccggtgtcctgggccgtcgtgcagccaggggccgggggatggttcgagtgggccgggtaccgcgccgtcgccgccatggtccgcgacgccgggctccacctccgcgtctcgctccgcaccgacggcgacgcgctccccgagtgggtggccgacgccgcggacgccgaccccgacgtcctcttcacggaccggtctgggcaccgccgcgtcgggtgcctatccttcgccgtcgacgagctccctgtgctcctcggcaagtcgccgctccaggcctacgaggccttcttccgcagcttcgctgacgagttcgaggacttcttggggtcaacaatcacggatgtgactgtcagcctgggtcctaacggcgagctccagttcccgtcatacccgccggggaaccatggcgccggtggctacgccggcatcggcgagttccagtgctacgacaagtacatgctggcccggctgaagcgtcacgccgagtcgtcggggcagccgctgtggggcctgtcaggcccacacgacgggccgcggtacgacgagtcgccggagtcgtccgccttcttcagggagccagggggctcgtggaagtcggcctacggggagttcttcctgtcctggtacgccggggagctcctggcgcacggcgaccgcgtcctggccgcggcgtccagggcgttgggcggcaagcccgtggcgctgtccgccaaggtgccgctcctgcgcgggccgagccccgtcgacgccaccgcggggctccacggcgggtacggcccggtcgcggagatgttcgcgcggcacgggtgcgcggtgatcgcgtcgggcgtggaggcacagccggacgccacggcggaggatcgcctggcccggctcaaggccgcctgcgcggagcacggcgcgcgtctcgcggcggagagcgcgccactcgccgcggcgcgcgacggcgccggcgccgcgggcggcgtctggctgtccgccgggcgcacccggccgtgccagttcacgtaccagcggatgggcgcggagttcttctcgccggcgcactggccgctgttcgtgcagttcgtgcgcgcgctggagtgccccgaggaggcccatgaggacgacctgccgggcagcgctgacggcggcgctcggctcaccgtgccgtccgcggccgcggccgccccgcgcggcgaagccacgagggaggtgcagattcagaccgtgtgaatcgcagggaaggcatttgtcacgtagtattcttgatgtgtagtaagagtattgggcagtaaataaatttgagctgatacttttatcagtgtgaagtgggaaccaagagcgggagtgtatgctatagtatattactaggattagtacgtactgatccattggtatatcttttcatcgtgataatgatg

SEQ ID NO: 5214 - DNA, 1044 bp, Zea mays; identical to SEQ ID NO: 1589

SEQ ID NO: 5215 - DNA, 931 bp, Zea mays
catcaccagttcagtccaccgttccgccggcccgcccgtacccgcctgcgcctacacatcgctgctccaggtccccatggcgaagactacgcaacccaccgcggggatgcgggatcccctgctccccacctccaccgccgcctcaccgccgccctacctcgacccgcatcccgccgactcctacacctacacggtcctccttgtccccgttcgcctccaccgcggcctctgtcgcggcggccgttgcatcgtcccctgcctcaccgttctcttccttctcgcgctcgcgggcttcctcctctggcccgcggacccggacatctccctggcccgcctccacctagcgcacgtctccgtcgtggcacgccctgccgtcgccgtcactatatccgccacgctcaaggttcgcgttcgcaatcctgacctcttcgcgctcgactacacccgcctcgacgtcgctatcggctaccgcggtgcggggcttggccgggtaacatccggcggcggacgggtccgggcgcgcgctgtctcgtacgtcgacgccaacctgcagctcgacggcatacgcgtcgtcgaggacgcgatgtacctgctcgaggacctcgcgcaaggatccgtgcccttcgacaccatcgccgaggtcgagggccacctccacttccttttcctcagcatcccggtcaaggggagaatatcttgcgtaatgcatattaatccacacaaccaaaccatagtacatcaggactgctatcctgagtgaattgcttatggcgtggaaatgtggaagggtgtaagctatgttgccttgcgaatggatcgtttgatttgtttctaacctttgcttccagtcgtggttgtaaaagtaagaaccaactaaggggtgtttgaatgtaattgagctaatagttagttcgcaaaaaaaaaaaaaaaa

SEQ ID NO: 5216 - DNA, 1408 bp, Zea mays
accagttcagtccaccgttccgccggcccgcccgtacccgcctgcgcctacacatcgctgctccaggtccccatggcgaagactacgcaacccaccgcggggatgcgggatcccctgctccccacctccaccgccgcctcaccgccgccctacctcgacccgcatcccgccgactcctacacctacacggtcttccttgtccccgttcgcctccgccgcggcctctgtcgcggcggccgttgcatcgtcccctgcctcaccgttctcttcctcctcgcgctcgcgggcttcctcctctggcccgcggacccggacatctccctggcccgcctccacctagcgcacgtctccgtcgtggcacgccctgccgtcgccgtcactatatccgccacgctcaaggttcgcgttcgcaatcctgacctcttcgcgctcgactacacccgcctcgacgtcgctatcggctaccgcggtgcggggcttggccgggtaacatccggcggcggacgggtccgggcgcgcgctgtctcgtacgtcgacgccaacctgcagctcgacggcatacgcgtcgtcgaggacgcgatgtacctgctcgaggacctcgcgcaaggatccgtgcccttcgacaccatcgccgaggtcgagggccacctccacttccttttcctcagcatcccggtcaaggtgaatggttcgtttcttgttttttatattgttatatatgcagatctcatgaattgaattataaactgtatcagttttcggacttagacgcgtcttgtctttttccatggtattgcgaaagcccatatgactacgtctctacgacgttaaatttggtagggtattgacgtgaggtgaagcatttttggaattttcactgccgacaagagtttactattacccgcataatttatctgatatgattgttaaggtgtaaggtccatacaatggctagtgcattataaagaaaaacaacacagaacaatgcagaaaaaaagagaggagagaagacctactcaatcttcttgcattgatctagatatctttcatctgtcagacatggtatggccatcatattcagaacattcatggtgtaatgttagcaggatacatgctcgaattctctcattcatgattcactaaatgatatatttgtttttttatatctgcaaaaggacataatgagacatgtcttaaatacttagcatttagcttccattttgattcattgttacttctaccatgatcagtgacaagttacctcctgtatgcagatatcatttttctataaaactttgattcaagatgtaacagtgatttagtatgttgcctctctaagaatgcattgtatcaaacatatcctttgtttgacttctttttacgaatttgaaacaaattgttatccttt

SEQ ID NO: 5217 - DNA, 971 bp, Sorghum bicolor
ccgcgtacccaccgctgcttctgctcccccatggcgaagaccacgcaacccaccgcgggggcgcgggatcccctgctccccacctctggcgccgccgtcgcctccccgccgccctacctcgacccgcacccggccgactcctacacggtcctcctcgtccccgtccgcctccgccaccgcctgcgccgcggcagcggccgctgctgcggcgtcggcccctgcctcaccgcgctcttcctcctcctcgcgctcgcgggcttcctcctctggcccgccgacccggacgtctccctcgcccgcctccgcctcgcgcacgtctccgtcgtggcgcgccccgccgtcgccgtcaccatatccgccgcgctcaaggtccgcgtccgcaacccggacttcttcgcgctcgactacaaccgcctcgacgtcgccatcgcctaccgcggcgcgccgctcggccgggtcacgtccggcggcgggcgggtccgggcgcgcgctgtgtcgtacgtcgacgccgacctgcagctcgacggcatacgcgtcgttgaggacgcgatctacctggtcgaggacctcgcgaggggatccgtgccctttgataccatcgtcgaggtcgagggccatctccacttcttcttcctcagcatccctgtcaaggggagaatatcttgcgtggtgcatgttaatccacacaacgaaaccatagtacatcaagactgctatcctgagtgaaaagcttatggcgtggaaggctgtaagctatcttgccttgcgaatggatcgtttctaagcttcgcttagagtcgtggttgtgtaaaagtaaggaacaactgaactctactgggtaatgcgcctattgtaaagccgttagcacgtcatgtttatatcaatcagtttacctatgagaaaattgccatttggcattgatgttacggtgatgtttggctcgattgcaacaatgtcacacggattgtctg

SEQ ID NO: 5218 - DNA, 1051 bp, Oryza sativa Japonica Group
aatcaacctcctcttccttcctaagctacgccaaagcccactccccgcaaccacccccacacccccaccaccggcgaccaccgcccccaccaacctcgccctcgccctcccatggcgaaggcgcagcctccgcctgcgcgggagcccctgctcccctcctccgcctccccgccaccctatctggacgcccgcgccggcgccgacgccaacgcggactcgtacgtcctcctcgtccccgtgcggctccgccggctgcggcgcgggtgccgctgccgctgcctcggcccgctcctctccacgctcgcgctgctctccctcgccgggttcctcctctggcccgccgacccggacgtcagcgtggcgcgcctccgcctcgcgcacgtctccgtctccgcgcgccccaccgtccgcgtcaccatctccgccgcgctcaaggtccgcgtccggaacccggacctcttcgcgctcgactacggccgcctcgacgtcgacatcggctaccgcggcgcgccgctcgggcgcgtcacctccggcggcgggcgcgtccgcgcgcgcgccgtctcctacatcgacgccaacctcagcctcgacggcataagcgtcgtggaggacgcgatctacctcctcgaggacctcgcgcggggatccgtgcccttcgacaccgtcgctgaggtcgagggccacgttcacttgttcttcctcagcatccctgtcaaggggagaatatcttgtgtggtgcatattaacccgcacaatcaaactatagtacaccaagactgctatccggattgagttgctaatggcgttctagcaatcgtcgcgtgtgaagaggtcattttaaacttcccttggagtgctttcagctgttgtataaatatgatccatttggttatgtaccatggttgtgcacttgaggcaaaacattctttatcttgcactacgctggtagacgggtcgattgtaaatttcttagcaggcctaaataccatggttttaagtcatgtctatacgatcaatcagttacccaaagagaaaaaaattccacattggc

SEQ ID NO: 5219 - DNA, 1509 bp, Zea mays
gtcagattattgttatccttgagtgagtgaggcccaaaggcagcagcacgtacagagcaagcgaagggagaactcaagcgagggaggcagagggcgaagctaagcaagcagctagctgctcactgcttgctctgtgctggtcgtttgctctgtgctggtcgcgttccgtttgcaggaactccttgcctggtgatggacaggcacacctgcaggctctgcttccggcggttccacaacggccgcgcgctgggcggccacatgcgctcccacgtcatggccgcgtcgtcggctgcagcgcgctcgccgctgccgcggcagcaatcgccgccgttctccctggcgtccacctcgtcgacggagatgggcgacgggccggcgcggcagaagccactcgcggcgccgtgcgtcgcacgcgagggcgccacgaaagcgttcggctttcctggactctccggcggcggcaggcccgcccgcggcgagtcttcggtcgtgcaggacggggagagcgacacggagtcgtccccgcggttcgccgtgagccggcgacgctcaaagcgggcgcgccggcgcgcgcccccgccggcggtggcgtcctccgatcccgagcagccagcgagcagcgtctccgacgcgacgccggaggaggacgtggccatgtcgctcgtcatgctgtcccgggactcgtggacgcggtccagatccggctggggcccggcgagctcggaggcggcggagcaggaccacgacgacgacggtgtccgctcgctcgtcggcgcggactatgccgatcacgagcacggcgtcgcgcgctcggaccacggcaggcaccagtgcggcgcgtgcaggaaggtgttccggtcgtaccaggcgctcggcggccaccgcgccagcgtcaagagaggaaagggcgggtgcgtgccggtgccggtgccgcctcccgccgcgccgtcgtccaaggctcgccgcgccgagaacggcccggcggtccacgagtgcccgttctgcttccgcgtgttcgagtcgggacaggccctgggcggccacaagcgcgcgcacatgccgtccggcgcgcccgccccacggcccccgtccccttggacgccagcgaaatgcggcgacagctccatgtccatcgacctcaacgtgccggccgcgacggacgacgacttcgagctctccgccgtgtacgacaccgagttcggcggcaacagacagtgaggccagctgctgacccgatccgaccgatacttactgctacgacgccaacttcagaccggctgatgctcttgcgcagctgctgcggtaaagggcttgggtcccttccaatccatgcaagaattagacggagagtaacagttgagcatttttttttgttttgttttgttttgtttggtctgttactccactgcgattgttagtctggcaggtacgtacctaaattagatgagcagtacattcatattattttcgttctcttgtaggagtaccaaaaaatcgaagtggcccatt

SEQ ID NO: 5220 - DNA, 1667 bp, Zea mays
actcgtcccttcgttgctaggtggagaggagcgatgcttgtcacctactcctttttaggtcccactactctcccctctcacacttcttccgcctcttttcccgtcagattattgttatccttgagtgagtgaggcccaaaggcagcagcacgtacagagcaagcgaagggagaactcaagcgagggaggcagagggcgaagctaagcaagcagctagctgctcactgcttgctctgtgctggtcgtttgctctgtgctggtcgcgttccgtttgcaggaactccttgcctggtgatggacaggcacacatgcaggctctgcttccggcggttccacaacggccgcgcgctgggcggccacatgcgctcccatgtcatggccgcgtcgtcggctgcagcgcactcgccgctgccgcggcagcaattggcttcgctctccctggcgtccacctcgtcgacggagatgggcgacgagccggcgcggcagaagccactcgcggcgccgtgcgtcgcacgagagggcgccaggaaagcgttcggctttccaggactctccggcggcggcaggcccgcccgcggcgagtcttccgtcgtgcaggacggggagagcgacacggagtcgtccccgcggttcgccgtgagccggcgacgctcgaagcgggcgcgccggcgcgcgcctccgccgccggcggtggcgtcctccgatcccgagcagccagcgagcagcgtctccgacgcgacgccggaggaggacgtggccatgtcgctcgtcatgctgtcccgggactcgtggacgcggtccagatccggctggggcccggcgagctcggaggcggcggagcaggtccacgacgacgacggtgtccgctcgctcgtcggcgcggactatgccgatcacgagcacggcgtcgcgcgctcggaccacggcaggcaccagtgcggcgcctgcaggaaggtgttccggtcgtaccaggcgctcggtggccaccgcgccagcgtcaagcgaggaaagggcggttgcttgccggtgccggtgccgcctcccgccgcgccgtcgtccaaggctcgccgcgccgagaacggcccggcggtccacgagtgcccgttctgcttccgcgtgttcgagtcgggacaggccctgggcggccacaagcgcgcgcacatgccgtccggcgcgcccgccccgcggcccccttccccttggacgccagcgaaatgcggcgacagctccatgtccatcgacctcaacgtgccggccgcgacggacgacgacttcgagctctccgccgtgtacgacaccgagttcggcggcaccagacagtgaggccagctgctgacccgatccgactgatacttactgctacgacgccaacttcagaccggctgatggctgatgctcttgcgcagctgctgcggtaaagggcttgggtcccttccaatccatgcaagaattagacggagagcaacagtcgagcattttttgttttgttttgttttgtttggtctgttactccactgcgattgttagtctggcaggtacgtacctaaattagatgagcagtacattcatattcttttcgttctcttgtaggagtaccaaaaaatcgaagtgacccattacttggattttgctattgggaagtgcattcaccaaaaaaaaaaaaaaaa

SEQ ID NO: 5221 - DNA, 1599 bp, Zea mays
cttgcttaatagtggacaggaggaggagcgatgcttgtcatctactcctgttaagttccccactccgcccaccccctcacacacttcttccgcctcactttccatcagattattgttatcgttgagtgagtgaggcccaaaggcagcagcagcacagagcaagaccgcaaagaaagcaagcgggcaagcctccttcaccattaccgcgcatgtgctctgcgccggtcatctgccttcggtgtaggaactcttgcctgtttgctcggtcatggacaggcacacctgcaagctctgcttccgtcgtttccacaatggccgcgcgctgggcggccacatgcgctcccacgtcatggccgcgtcgtcggctgcagcgtactactcgccgccgccgctctccctggcgtccacctcgtcgacagagatggacgacgacgccgatccggcgccgcagaagccacccacgccgtgcgttgcacgcgaagaaggcgccaagaaagcgttctgctttcctgaactctccggcggcggcagggccgcccgcggcgagtcgtcggtcgtgcaggacggggagagcgacacggagtcgtccccgcggttcgccgtgagccggcgacgctccaagcgggcgcgccggcgcgcgccgccgccggcggcgtccgatcccgagcatccggcgagcagcgtctccgacgcgacgccggaggaggacgtggccatgtccctcgtcatgctgtctcgggactcgtggacgcggcggtccaggcccgggcctgggcctgggcctgatccccgctggggcccggcgagctcgggggccgatcggagcaaggacggcggcgtccgctcgttcgtcggcgcggacgacgaggccgatcgcgagcacggcgacgtcgcccgcccgcgcgggaggcaccggtgcggcgtgtgcaggaaggtgttccggtcgtaccaggcgctgggcggccaccgcgccagcgtcaagaaaggcaagggcgggtgcgtgccggtgccggtgccgccttccgccgccgcgccgtcgcccaaggctcgccgcggccagaccggcccggccgtccacgagtgcccgttctgctctcgcgtgttcgagtccggccaggccctgggcggccacaagcgcgcgcacgtggcgcacggcgcccccgccccatggacgccagcgagatgcggcgacagctcggggtccatcgacctcaacgtgccggccgcgacggacgacgacttcgagctctccgccgtgtacgacgccgagttcggcagcgccaggcagtgaggccagccagctgctgacccgctcgtcgatgcctgctacgtacgactcggaccggccggtgctctttcacagcacagctgctgctgcggtaagggcttgggttccatacttccattcgaatattcgatgcgagaaacagatggagaagaacaacagttgagcatttttttgtgtgttcttcttctttgttacttgttagtgtagtaagtacgtacctaagttagacgaacagcacattcatattcttttggttctattgtacctaaatcaaagtgtccccttactcgaatctcgtcattggaaagtgc

SEQ ID NO: 5222 - DNA, 1161 bp, Sorghum bicolor
atggacaggcacacctgcaagctctgcttccgaaggttccacaatggccgcgcgctgggcggccacatgcgctcccatgtcatggccgcgtcggctgcagcgttccactcgccgctgctgtcgcggcagccgcaatcgccgccgctctccctgtccctggcgtctacctcgtcgacagagatgggtgacgacaagccgtcggcgcagcagaagccgccaccgacgccgtgcgttgtacgcgaaggcaccaagaaaaggttcgacgactcccctggattctcttcccgcggtagggccgcccgcggcggcgagtcgtcggtcgtgcaggacggggagagcgacacggagtcgtcgtccccgcggttcgccgtcgtgagccggcgacgctcgaagcgggcgcgccggcgcgcgccgccaccggcggtggtggtggcgtccgacgatcccgagcagccagctgcgagcagcgtctccgacgcgatgcccgtggaggacgtggccatgtcgctcgtgatgctgtctcgggactcgtggacgcggtccagcagatccggccggggggacccggcgagctcggaggccgtgcagaggcagaacaatgaccacgacgacgacgacgacgacggcgtccgctcgttcgtcggcgtcggcgcggacgacgccgatcatcacgagcacgaggacgacgacgtcgtcgcgcgcccgccgcgcggcggcaggcaccaccagtgcggcgtgtgcaggaaggtgttccggtcgtaccaggcgctcggcggccaccgcgccagcatcaagaaagggaagggcgggtgcttgccggtgccggtgccggttccgcctcccgccgcgccgtcgtcgtccaagtctcactgccgcgccgagaacaacggcccggcgccggcggtccacgagtgcccgttctgcttccgcgtgttcgagtccggacaggccctgggcggccacaagcgcgcgcacatgccgtcctccgccgccggcgccggcgcgcccgccccgccgacgaccccatccccgcggacgcctgcagcgaaatgcggcgacagctccgggtccttcgatctcaacgtgccggccgccgcgacagacgacgacttcgagctctccgccgtgtacgacaccgagttcggcggcggcagacagtga

SEQ ID NO: 5223 - DNA, 1269 bp, Zea mays; identical to SEQ ID NO: 1154

SEQ ID NO: 5224 - DNA, 1301 bp, Zea mays
tcctccccgctccagcgcccctgcagttctcgctccactgacagctcgccgaggggccgcgccgcgctcgagacccgtcgatggcgaggcggagcctggcggtcgacgcaaccgcaggcgccgcatcccgggttcggttcgcgcccacctccaataacctgctcgtctcctcatgggattcggggctgcggttgtacgatgccgacgagggcacgctcagggtcaacgtggagtcagaggcggcattcctcgactgctgcttcgaggatgagtctgcagcgtttgcctgcggctctgatggatctgtgagaaggtacgacttccactcaggttcgcaggatacggtggggctccatgaagatgcactagcctgcattgagttctcttcactgaccggtcagattatgacaggcagccttgacaagaagctaaagctttgggattcaaaaacaagaaatgtaagcccgagcggcaccataaccttaaattcagatgtggcctcaatttctatatgcggcatttacatattagctgcagttgagagaaatgtttatctttatgacatgaggaatctaacaagaccagttgatgaaaaagactgtcctctggattatcaaattcgatgccttcatacttctctagagtggaatgcttatgttgctggctctgtggatggagttgttgcattgaagtatcttgatcgtggaacagatagagatttgggatatgcatttcgttgtcatccaaattccagaaacggaaaatggaatctggtccctgtaaattgcatctcagttcatccctgcaacagaactttcgttacgggagatgataaaggatgcactattgtttgggatgctcaattgaaaaagaagctgattgagcttccaatgtatttgggcagtgtggcgtcagtggcatacaaccataatggccaacttctggcggttgcctcaaactattttttagaagtataaagaggagcaacaccaccaggtattcattgaaactgtggagaacttcaaaggcaagtcccgtgtgggatagagccttctaacaaaacatgttctgttcatctgttgtattgtattttgtctaccatacatgttaaaggtcaccaagatgtgacagcatgttgtattatgttgtatgactaagcattttttttaggaaacgacataatatggctaagcaatacttgtatatattggttacatctagtctgagacagctgtggtgtgttgtaactcttttgagcttttgcaaccagtattgctgttctggtaaaaaaaaaaaaaaaa

SEQ ID NO: 5225 - DNA, 4209 bp, Sorghum bicolor
atggacggccctgccacctcgccggcgagcgaggtgccgttccgcatcagcttctccggccacggcggccacctccgcctcgaccctaccccgcacacgcacagcctcattccggatttcgtcctgccgccggcttacccggccgagagcccgagcagcgtgaaggagtacctcgagaggaactacctcaaccctgagctgcacctccccaccgcggccgatagcgggagggtgtgggatgtcgattggttcgccctggccaggccgccgctggagccctccgccccccgcaccacgctcgcgcccgcctgggtgccgcctttccggcgcggccggcagaagctgcaatccgcgtcggagtctcaagtgtgggatcctgagtccgtgcaaatggagatggtcgacgtgtttggttcggggaccggggggatagcgcctcggatgcctggtccggcgaaggactttgtcagggggagcatcaacaacagaccttttcgtccgggcggtctgcaggatgacacggctgaggcggctgcgctggagaaggcgttccctgagggtgcacgcaatggtgattgggtgcgtgagctcatgagtggtggcccagcgcaggttgctcctccagggttccgtaagggattggagctgggtcagttgaaggagtataaaagccactggaaatgtttccgggatggagaacttgtagaggagcaacctgcatcatcatcgaatgacacaatggaaaagtactctgtgcagtttgatgatcttttcaagatagcgtgggaggaagatgctgccaacaaattgttgcaggagggtgttgttcaacaatctgctgaaagtgaaggaatcaatgaaattggcaaacagaaagttgcattgcaggatgcttctgagactataataacactagatgctaagaaacaggaagctgatgtcataagggatgttcctgaaactcaaacagacttggatcaaatgttatcttccgaagtacaggctgctgcaggcagagaaccaggtgtatcaggtgatgagaagccaacgcaggatggcatggtttgggcacttgttggtggggacgaagacatagtgactaacttctacaaactcgttccagatatggcaatcgagtttccatttgaattggataagttccagaaggaggctatatattatcttgagaagggtgaatcagtctttgttgcagcccatacttcagccggaaagacagttgttgctgagtatgcattcgcattagcaacaaaacattgcactagggctgtctatactgctcctattaaaactatcagcaaccagaaatacagagatttttctgggaagtttgatgtgggacttctgacaggagatgttagcatcaggccagaggcaacttgcttaattatgactactgaaatattgcgttcaatgctctacagaggtgcggacattatacgtgatattgaatgggtaatcttcgatgaagtgcattatgtaaatgatgctgaaagaggtgtagtctgggaggaggttccaaatactgttgaatttgctgattggattggtcggacaaagcagaagaaaattcgtgtcacgtcgaccaacaaaaggcctgttccgcttgagcattgcttgttctactctggagaagtgtacaaaatatgtgagagggacatgtttcttactcaaggatttaaagaagcaaaagatgctttcaaaaagaaaaattcgaataagtttggagtgaaacctggtccaaggtcaggaacccctgcagtacgtgctggaactcaaggcaaaaatccagatacatccaacaaggggagagatcagaagtacccaaagcaccacaattccaattcaggagcagccacagttcaacaaagctcctcagggccaaagagatttgaaaccttattttggatgccacttgtgaataaccttctgaagaaatcccttgtgcctgtggtgattttttgtttctcaaagaaccgctgtgataaatcggcagatagtatgtttggcgctgatctcaccagtagttcggagaaaagtgaaatacgtgtcttctgtgacaaggcgttttcacgtcttaaaggatctgataggaaccttccacaggttgttggaatacaaagccttctgcgaagaggaattggagtacaccatgctggacttctccctattgtgaaggaagttgttgagatgctattctgtcgtggtgtaatcaaggtactgttttccactgagacatttgcaatgggtgttaatgcaccagcaagaacggttgtgtttgattctttaagaaagtttgatggaaaagaacaccgaaaattgcttccaggggagtatattcaaatggctgggcgagctggtcggagaggacttgataacattggtactgtgatcattatgtgtcgtgatgaaattcctgaagaaagcgatttgaaaaatctgatcgttggaaaaccaacccgcttggaatctcaatttcgattaacatacactatgatactacatcttctgcgtgtggaggaactgaaggtcgaggacatgctcaagagaagttttgctgaattccatgctcaaaagaatttgcctgagaaggaaaagctacttctgcaaatgctccgtcaacctacaaggacaatagagtgcataaaaggagagccttctattgaggaatactatgaggtggctctagaagctgagaaacatagggaatctataacacaagcaattatgcagctgcctaattctcaacagtttcttacgcctgggagattggtggttgttaaatctgattgtgatgatgatcacttgcttggtgttatactgaaaaatccatcaccaatgctaaagaaatatgttgttctggtattgaccggtgattgcagttcatctgtactagcccctgagttcaataaaaatgaaaagggacctggggattttcaaggaggtcaatttattgccctgaaaggaaaacgtggcatggacgatgaatattactcttctgttatttcacgaaaaggttcaggtgtaataactatcaagctaccatacaagggggatgcatctggaatgggctttgaagtaagagcaattgagaataaagaaatcatgattatatgcaccagcaaaataaaggttgatcaagtcagactccttgaggatcctaacaaaattacatactctagaactgtccaacagcttatgaaggagcaaccagatggaactaagtttcctcctgctttagatgcaataaaagatctaaaaatgaaagacatggatcttgttgaaagctaccatgcataccacagactactgcaaaaaatgtctgaaaacaagtgccatggttgtataaaactaaaggagcatatatcgttgatgaaggaggaaaagatgtacaaggatgagttgagtaaattgaaattccaaatgtcagatgaggcacttaaacagatgccggagtttcaaggcagaattgagttgctaaagataatcgagtacattgattctgatctagttgtgcaacttaagggtcgagtagcatgtgaaatgaactctggtgaggagttaatatcaacagaatgtctgtttgaaaatcaattggatgacctagaacctgaagaagctgtggctattatgtctgcattcgtcttccaacagcggaatgcttcagagccatctcttactccaaaactggctgaagccaaaaagaggctttatgatacagcaatcgaattaggaaagctccaagcagacttacaggtgcccgtggaccctgaggagtatgcacgtgataatctcaagtttggccttgttgaggttgtctacgagtgggcaaaggggacacctttctcagacatatgtgagctgactgatgtatccgaagggatcattgtaagaacaatcgtccgtctagatgaaacatgcagggaattcaggaatgcagcttccatcatggggaactctgcgctgttcaagaagatggagatcgcgtctaatgctattaagcgcgacattgtgtttgcggcaagcttgtatgtcacaggaatctgatacctcgtagtcttttttgcttttgttagagaaaaatccttgtggcggtggaatgctactaacctaaccttagccagcactaatgctgtggttattttttcaattccggattctcgcttttgttagttcaatcaaagttttccg

SEQ ID NO: 5226 - DNA, 972 bp, Sorghum bicolor
atggcgaggcggagcctggcgggcgacgcaaccgcaggcgccgcatcccgggttcggttcgcgcccacctccaacaacctgctcgtctcctcatgggattcggggctgcggctgtacgatgccgacgagggcacgctccgggtcagtgcggagtctgaggcggcactcctcgactgctgcttcgaggatgagtcttcagcgtttgcttgcggctccgatggatctgtgagaaggtacgacttccactcaggttctcaggatacagtggggctccatgaagatgtgcttgcctgcattgaattctcttcgatgactggtcaggttatgaccggtggccttgataagaagataaagctttgggatttaaaaacaagaaatgtaagcccgagtggcactataatcttagattcagatgtggcatcactttctatctgtggcgtgtatatattagctgcagttgcgagaaatgtttatttttatgacatgaggaatctaacaacaccagtaaatgaaaaagactgtcctctggaatatcaaattcgatgccttcatgcttctccagaatggaatgcttatgttgctggatctgtggatggagctgttgcattgaagcatcttgatcgtggaacagatagagatctaggatattcatttcgttgccatccaaaatccagaaatggaagatcaaatctggtccctgtaaattgcatcgcagttcatccctgcaagaaaacctttgttactggagatgatgaaggatgcactattgcctgggatgctcgttcaaaaaagaagctgatagagcttccgatctatttgggcagtgtggcgtcaattgcatacaaccataatggccaacttctggcggttgcctcaaactattttagagaagtagataaagaggtgattgaccaccaccaggtattcattgaaaccgaggaggacttcaaaggcaagtcccgtgtcgggtag

SEQ ID NO: 5227 - DNA, 1090 bp, Sorghum bicolor
cggcggccggtctgcctcttcctccaagttcgccccgccccgtctctcggttctctcccgtgcccccacgccgcctcggtgctcccactctcctcccagcgccctcacccctggcgcacctctccctctctctcgttgtcccgtgcccctcgcgtgcgctctgtctctttgtggcggcggcccagacctacgccacaggtgcctagatcgccatcttcgggaccttcgccggtgacgagcacccaccagctgatacaggaaatttacttttatccatactccacctactttgttgactatggcactagcagctatctataaccttttcatcattaacaaatctggcggtcttatatactacaaggactatggttcagcagggaggatggataccaatgacagtctaagattagcaagtctctggcattcgatgcatgctatctcccagcaactctcccctacccctggttgtaatggcattgatctcttacaagctcataactttgatctccattgctttcaatccctcacagggacaaaatttttcgttgtatgcgaaactggagctccaaatatggaaatgctgctgaaagtgatttatgagctgtacacggactttgttttgaagaatccgttctatgagatggagatgccgattcggtgtgagctgtttgatcacaatctggctcaggtgatccagaaggaccgtgttgcacttctgggtcggtgaaactcgaaaacctatagcctcaaccctatcatgtatcttgtactttttcctttttctacattattaccctggacttgctctgctggaaagttctaccggtgcataaccgataacttgaatagtgtgttgctcgcatgtaatcttcttttgatgtaaatgggatgtagagctttgcgtgcataaaatgctgctgcaaatagcaactccatggaagcagcttttgttctagcatgtttttcctgcgaggatcttgagcatgcccgcatgatcagtgatatagttaaaggtttgtttagactgttggaattttatggcctatttggaatgcgggaaataaatttctgtttctgtgtttttcat

SEQ ID NO: 5228 - DNA, 1390 bp, Zea mays
gtccccatgcatacagcatacttcagcctctctctcggttctcccgggcccctcgcgtgcgctctgtcgccgtcgccgccgccgccaacctacgccaagtgcccagatctccaccctcgggaccttcgccggcagcgaacacccaccaccagctgatatagggcatttacccttttgtgactatggcactagcggctatctataaccttttcatcattaacaaatcaggcggccttatatactacaaggactatggttcagcagggaggatggataccaatgacagtctaagattagcaagtctgtggcattcgatgcatgctatctcccagcaactctcccctacccctggctgtactggcattgatctcttacaagctcataactttgatctccattgctttcaatccctcacagggacaaaatttttcgttgtatgcgaaactggagctccaaacatggaaatgctgctgaaagtgatttatgagctgtacacggacttcgttttgaagaatccgttctatgagatggagatgccgatccggtgtgagctgtttgatcacaacctggctcagatgatccagaaggaccgtgttgcgcttctgggtcggtgaatcttgaaaactcatggtctcagcccttgaaaaccctacttttcccgttttcgacgcttggacttgctctgctggaaccctaaattctaccttgcggcactgctgtgctgtgcataaccgataacttgaatagtgtgttgctcgcttgtaatcttcttgcggtgtgatgaaatgtagagctttgcgggcataaatgccgctgcaaatagtaacaacatggaagcagcttttgttcttgcatgttttccctgcaatgagcttgagcagcttgatcagggctggaagggccgccgcatagatccagggaaagagagacgcgtttgtggtccatccataattcatatgaccggagagcctgaccctgacgccaacggcaagcagcagtggcggcatccagatcctggcgcaccgactgcacccgcccgtccggcaccttctttcggcggcagcggcactccgcgcgacacggggccgtgtccgtgtgggatgggatgggatggaatggaacagtaggctttttggcatttgcgaggacgcccaggcctgactcctctgaggccatctccatctccagcaggccgtataaacggctgtcgtttaggcatgcattaaccagagtatgagatttatgggagcaccttgagtggctcatggatcccctggactagcgtgcgcggtccatcacgcggtgtctgtttctgaattgagggtacgagggagcaataatggagcagccatggagatttcacccaacaacaacaaaaaaaaaaaaaaaa

SEQ ID NO: 5229 - DNA, 1385 bp, Zea mays
cggaaaccctggtgacttgtgagaattttttctcgtcccattctcttcttctttgcaagatccgaaaaactataaccctaattttctgtgatctagatattggttgattacttatgtatatgtgctccgattggcctttccaaaaatatttttttaccgtgtattttttggttatgcatatgtgctccaatctgatatggctttcccaaaattttctcattatttgtactgtaatttaagaaattattattattattattattatgctatttagtatttgcatatcgaactgtggcacaattttgatggtgtattactgaattgctaaatggtttctactggtttgaataatttggatcctgcatacccacacaagaatcctagatccgccacacacaccaggtacaaccaccccttgtcttcccttcctgctgccctaaacagagcacccaaacccaagctatctgtattcggatcttatctgattcaattacaagtgtagtatgcatgcattatgcctacaaacttgttttttcaatttttttttttgcaaagaagtattgggtgtaaatgtgtatacctatgtcctttactgattccacctctaggtgtcagatggatgtttctgctgaatccactcgtgttggtctcttggaaaacaaaatatgaacctagatccaggcctctctgccctacctcacagcttgcatagagcttaaccatctgatacaggaagattacttttatctatactccaccttctttcgtggctatggcactagcagctatctataaccttttcatcattaacaaatccggcggccttatatactacaaggactatggttcagcagggaggatggataccaatgacagtttaagattagcaagcctctggcattcgatgcatgctatctcgcagcaactgtcccctaccactggctgtactggcattgatctcttacaagctcataactttgatctccattgctttcaatccctcacagggacgaaatttttcgtcgtatgcgaaactggagctccaaatatggaaatgctgctgaaagcgatttacgagctgtacacagacttcgttctgaagaatccgttctatgagatggagatgccgattcggtgcgagctgtttgatcacaacctggctcaggtgatccagaaggaccgtgttgcgctcctgggtcggtgaaattggaaagcttttggtcctaaccataccatgtatcttgtactttcccccctttttctacattatgctcggacttcctgtgcaattgtctcggcagaagacagctggcgaccaacaactgtttggtcctgactattagcaccgtatttggaacagatctatggacgatccgccgtgtgtt

SEQ ID NO: 5230 - DNA, 872 bp, Zea mays
ctcagctaaaaacgaaacagggaagtgccaaccaaactagccaaacaagtggtaataccacggccctttggcgacaggcgacagcaacagtgaaacgccccgctcccaagccggcaaacaccagcccccgcgacggcgccgcgccgtcctctcccgaccgacggcaacggaaaccctggtgacttctgatacaggaagattacttttatctatactccaccttcttttgtggctatggcactagcagctatctataaccttttcatcattaacaaatccggcggccttatatactacaaggactatggttcagcagggaggatggataccaatgacagtttaagattagcaagcctctggcattcgatgcatgctatctcgcagcaactgtcccctaccactggctgtactggcattgatctcttacaagctcataactttgatctccattgctttcaatccctcacagggacgaaatttttcgtcgtatgcgaaactggagctccaaatgtggaaatgctgctgaaagcgatttacgagctgtacacagacttcgttctgaagaatccgttctatgagatggagatgccgattcggtgcgagctgtttgaccacaacctggctcaggtgatccagaaggaccgcgttgcgctcctgggtcggtgaaattggaaagcttttggtcctaaccataccatgtatcttgtactttcccccctttttctacattatgctcggacttcctgtgcaattgtctcggccgaagacagctggtgaccaacaactgtttggtcctgactattagcaccgtatttggaacagatctatggacgatccgccgtgtgttcttctctaaaaaaaaaaaaaaaaaa

SEQ ID NO: 5231 - DNA, 845 bp, Zea mays
actactcagctaaaaacgaaacagggaagtgccaaccaaactagccaaacaagtggtaataccacggcccttgtggcgacaggcgacagcaacagtgaaacgccccgctcccaagccggcaaacaccagcccccgcgacggcgccgcgccgtcctctcccgaccgacggcaacggaaaccctggtgacttgaagattacttttatctatactccaccttcttttgtggctatggcactagcagctatctataaccttttcatcattaacaaatccggcggccttatatactacaaggactatggttcagcagggaggatggataccaatgacagtttaagattagcaagcctctggcattcgatgcatgctatctcgcagcaactgtcccctaccactggctgtactggcattgatctcttacaagctcataactttgatctccattgctttcaatccctcacagggacgaaatttttcgtcgtatacgaaactggagctccaaatatggaaatgctgctgaaagcgatttacgagctgtacacagacttcgttctgaagaatccgttctatgagatggagatgccgattcggtgcgagctgtttgaccacaacctggctcaggtgatccagaaggaccgcgttgctctcctgggtcggtgaaattggaaagcttttggtcctaaccataccatgtatcttgtactttcccccctttttctacattatgctcggacttcctgtgcaattgtctcggccgaagacagctggtgaccaacaactgtttggtcctgactattagcaccgtatttggaacagatctatggacgaaaaaaaaaaaaaaaa

SEQ ID NO: 5232 - DNA, 629 bp, Oryza sativa Japonica Group
ttcttgtgtgataatggcgttagcagcaatctacagccttttcatcattaacaaatctggcggccttatatactacaaggactatggctcagcagggaggacggacaccaatgacagtctacgcttggcaagtctttggcattccatgcatgctatctcccagcagctgtcccctacacctggctgtgaaggcattgaccttctacaagcccacaactttgatctccattgcttccagtccctcacagggacaaagttttttgctgtatgcgaaactggtgctcaaaatatcgagactctactgaaagtcatatacgagctctacacggattttgttctgaaaaatccattctacgagatggagatgccaattcgttgtgagctttttgatctcaacctggctcaggtcattcagaaggaccgcgtcacacttctgggtcgatgaatcatttagaaaacatgacgcaccatgtctttgtatgtggcttatatgacatgtatggtgtcagtagggtacttggaattcaggcaagtcattacactgcatcacaaagtccatatacagtgtgcagtcgattccttctagttctgaaaattactttattcctgaagtatcatttgtgccattt

SEQ ID NO: 5233 - DNA, 859 bp, Oryza sativa Japonica Group
tccgtcaaaaaaagcttcttcagctcccgacctcgtcttcagctccgatcgctcgccgcggcagatcccgccgccaagaaagacgccggcggacggagcgggagcgacgacctcgccgggccgcacgcacgcccgcacgcaccaccacctgctgaaatccctgcgtcgtctcgccgtggtgctagctaatacaggaaaattacttcagtttctactcagcattcttgtgtgataatggcgtcagcagcaatctacagccttttcatcattaacaaatctggcggccttatatactacaaggactatggctcagcaggtaggacggacaccaatgacagtctacgcttggcaagtctttggcattccatgcatgctatctcccagcagctgtcccctacacatggctgcgaaggcattgaccttctacaagcccataactttgatctccattgcttccagtccctcacagggacaaagttttttgctgtatgcgaaactggtgctcaaaatatcgagacactactgaaagtcatatacgagctctacacggattttgttttgaaaaatccattctacgagatggagatgccaattcgttgtgagctttttgatctcaacctggctcaggtcattcagaaggaccgcgtcacacttctgggtcgatgaatcatttagaaaacatgatgcaccatgtctttgtaatttttcggattcctgcactgcctttggatttgctcagccacaaaccaaagtattctttcgtatgtgttgctgataattaatgatatgaacatcatgatgtattgctcacttactcatctgtaaatctcttataaggtgctggatcgtagcattttgc

SEQ ID NO: 5234 - DNA, 426 bp, Ricinus communis
atggcagcaatttacagtctttacataatcaacaaatcaggtggtttgattttctacaaggattacggatctggtggaaggatggatacaaatgacagcttaagagtagctagtttatggcattcgatgcatgccatttctcagcagctatcaccggttgttggttgttctgggattgaactccttcaagctgatacttttgacctccattgtttccagtctcttaccgggacaaagttcttcgtggtttgtgaacctggaacgcctcacatggaggctctgttgaaagtcatttatgaactgtatacagattatgttttaaagaaccccttctacgaaatggagatgcctatacgatgtgaactctttgacatcaacgttacacagatcatacagaaggatcgtgttgctttgttgggtcgatga

SEQ ID NO: 5235 - DNA, 671 bp, Vitis vinifera
ctcttcttcatttctgggaatttccggaaaacaaattccgatggccgcgatctacagtctctacattatcaacaaatccgggggcttaatcttctacaaggattatggatcggcgggacggatggacacgaatgatagcttgcgattagcgagtttgtggcattcgatgcatgcgatttctcagcagttatctccaactttgggttgctcggggatcgagctccttgaagctgatacattcgacctccattgcttccaatcgctcactgggacaaagttctttgtggtatgtgagcctggaacacagcacatggagggtcttttgaaagtcatctatgaattgtacactgattatgtactaaagaatcccttctacgaaatggagatgcccatacgatgtgagctttttgatatcaacctatcccaagccgtacagaaggatcgtgttgccttgttggggcgatgacctacccttgtcttactatgtgttatttttgtctgtaaatttttagaacaatccctttgccaagtttgttcaaacttgatatctgtttaattctagttttatggatgattgaaatactacagctattaacaactttaagagatatggctttcttggggcttgacttatttcatattcatttattcattcagctattacaccgttt

SEQ ID NO: 5236 - DNA, 728 bp, Populus trichocarpa
cccccttctcagagccaaaccatcagcgaacaaaccctcactgaaaatcaaatttcactttgatccgaagaagaagaagaagaaattctctctcactctcagatctgattactcaaaaaaaaaaaaaaaattcagttcagaaaggcttgtgtgaatccgaaaaagcccttgggaatggcagcaatttacagcctttacatcatcaacaaatcaggtggtttgatcttctacaaggattatggatcttctggacggatggatacaaatgatagcttacgagtagctagtttatggcattcaatgcatgccatctctcagcagctatcaccaactgttggctgtttaggcattgaactcctcgaagctgatacctttgatcttcattgcttccaatcactcactggaacaaagttctttgtggtgtgtgaacctggaacacagcacatggaaggcctcttgaaagtcatatatgaattgtacacggattatgtcctaaagaacccgttttatgagatggagatgcctatacgatgcgagctctttgacatcaacctgtctcaggcaatacagaaggatcgtgttgctttattggggcgatgaactttcctgaattttgcgtcaataacttttgttatttttcattttcatttgtgcatttgccatgagatctttcaattttcttttatgctcttcttctccttagtggctgtttgtggttgcgttcaact
